(19) United States
(12) Patent Application Publication
(10) Pub. No.: US 2022/0105162 A1
(43) Pub. Date: Apr. 7, 2022

(54) T-CELL MODULATORY MULTIMERIC POLYPEPTIDES AND METHODS OF USE THEREOF

(71) Applicant: Cue Biopharma, Inc., Cambridge, MA (US)

(72) Inventors: Ronald D. Seidel, III, Cambridge, MA (US); Rodolfo J. Chaparro, Cambidge, MA (US)

(21) Appl. No.: 17/394,972

(22) Filed: Aug. 5, 2021

Related U.S. Application Data
(63) Continuation of application No. PCT/US2020/021138, filed on Mar. 5, 2020.
(60) Provisional application No. 62/814,721, filed on Mar. 6, 2019.

(51) Int. Cl. A61K 39/00; A61K 38/17

(52) U.S. Cl. CPC A61K 39/0008; A61K 2039/6056; A61K 2039/605; A61K 38/1774

(57) ABSTRACT

The present disclosure provides T-cell modulatory antigen-presenting polypeptides, including single-chain antigen-presenting polypeptides and multimeric antigen-presenting polypeptides. The present disclosure provides nucleic acids comprising nucleotide sequences encoding T-cell modulatory antigen-presenting polypeptides of the present disclosure, as well as cells genetically modified with the nucleic acids. A T-cell modulatory antigen-presenting polypeptide of the present disclosure is useful for modulating activity of a T cell. Thus, the present disclosure provides methods of modulating activity of a T cell.

### CROSS-REFERENCE

[0001] This application claims the benefit of U.S. Provisional Patent Application No. 62/814,721, filed Mar. 6, 2019, which application is incorporated herein by reference in its entirety.

### INCORPORATION BY REFERENCE OF SEQUENCE LISTING PROVIDED AS A TEXT FILE

[0002] A Sequence Listing is provided herewith as a text file, “CUEB-120WO_SeqList_RevDec2021_ST25” created on Dec. 14, 2021 and having a size of 717 KB. The contents of the text file are incorporated by reference herein in their entirety.

### INTRODUCTION

[0003] Central to the proper functioning of the mammalian immune system are the coordinated activities and communications between two specialized cell types, antigen-presenting cells (“APCs”) and T cells. APCs serve to capture and break the proteins from foreign organisms, or abnormal proteins (e.g., from genetic mutation in cancer cells), into smaller fragments suitable as signals for scrutiny by the larger immune system, including T cells. In particular, APCs break down proteins into small peptide fragments, which are then paired with proteins of the major histocompatibility complex (“MHC”) and displayed on the cell surface. Cell surface display of an MHC together with a peptide fragment, also known as a T cell epitope, provides the underlying scaffold surveilled by T cells, allowing for specific recognition. The peptide fragments can be pathogen-derived, tumor-derived, or derived from natural host proteins (self-proteins). Moreover, APCs can recognize other foreign components, such as bacterial toxins, viral proteins, viral DNA, viral RNA, etc., whose presence denotes an escalated threat level. The APCs relay this information to T cells through additional costimulatory signals in order to generate a more effective response.

[0004] T cells recognize peptide-major histocompatibility complex (“pMHC”) complexes through a specialized cell surface receptor, the T cell receptor (“TCR”). The TCR is unique to each T cell; as a consequence, each T cell is highly specific for a particular pMHC target. In order to adequately address the universe of potential threats, a very large number (˜40,000,000) of distinct T cells with distinct TCRs exist in the human body. Further, any given T cell, specific for a particular T cell peptide, is initially a very small fraction of the total T cell population. Although normally dormant and in limited numbers, T cells bearing specific TCRs can be readily activated and amplified by APCs to generate highly potent T cell responses that involve many millions of T cells. Such activated T cell responses are capable of attacking and clearing viral infections, bacterial infections, and other cellular threats including tumors, as illustrated below. Conversely, the broad, non-specific activation of overly active T cell responses against self or shared antigens can give rise to T cells inappropriately attacking and destroying healthy tissues or cells.

[0005] MHC proteins are referred to as human leukocyte antigens (HLA) in humans. HLA class II gene loci include HLA-DM (HLA-DMA and HLA-DMB that encode HLA-DM α chain and HLA-DM β chain, respectively), HLA-DO (HLA-DOA and HLA-DOB that encode HLA-DO α chain and HLA-DO β chain, respectively), HLA-DP (HLA-DPA and HLA-DPB that encode HLA-DP α chain and HLA-DP β chain, respectively), HLA-DQ (HLA-DQA and HLA-DQB that encode HLA-DQ α chain and HLA-DQ β chain, respectively), and HLA-DR (HLA-DRA and HLA-DRB that encode HLA-DR α chain and HLA-DR β chain, respectively).

### SUMMARY

[0006] The present disclosure provides T-cell modulatory antigen-presenting polypeptides, including single-chain antigen-presenting polypeptides and multimeric antigen-presenting polypeptides. The present disclosure provides nucleic acids comprising nucleotide sequences encoding T-cell modulatory antigen-presenting polypeptides of the present disclosure, as well as cells genetically modified with the nucleic acids. A T-cell modulatory antigen-presenting polypeptide of the present disclosure is useful for modulating activity of a T cell. Thus, the present disclosure provides methods of modulating activity of a T cell.

### BRIEF DESCRIPTION OF THE DRAWINGS

[0007] FIG. 1A-4C provide schematic depictions of examples of T-cell modulatory antigen-presenting polypeptides of the present disclosure.

[0008] FIG. 5A-5B provide an amino acid sequences of an immunoglobulin heavy chain CH1 domain (FIG. 5A; SEQ ID NO: 322) and a human kappa light chain constant region (FIG. 5B; SEQ ID NO: 323).

[0009] FIG. 6 provides an amino acid sequence of an HLA Class II DRA α chain (SEQ ID NO: 324).

[0010] FIG. 7A-7J provide amino acid sequences of HLA Class II DRB1 β chains (from top to bottom: SEQ ID NOs: 325-334).

[0011] FIG. 8A-8C provide amino acid sequences of HLA Class II DRB3 β chains (from top to bottom: SEQ ID NOs: 335-337).

[0012] FIG. 9 provides an amino acid sequence of an HLA Class II DRB4 β chain (SEQ ID NO: 338).

[0013] FIG. 10 provides an amino acid sequence of an HLA Class II DRB5 β chain (SEQ ID NO: 339).

[0014] FIG. 11 provides an amino acid sequence of an HLA Class II DMA α chain (SEQ ID NO: 340).

[0015] FIG. 12 provides an amino acid sequence of an HLA Class II DMB β chain (SEQ ID NO: 341).

[0016] FIG. 13 provides an amino acid sequence of an HLA Class II DOA α chain (SEQ ID NO: 342).

[0017] FIG. 14 provides an amino acid sequence of an HLA Class II DOB β chain (SEQ ID NO: 343).

[0018] FIG. 15 provides an amino acid sequence of an HLA Class II DPA1 α chain (SEQ ID NO: 344).

[0019] FIG. 16 provides an amino acid sequence of an HLA Class II DPB1 β chain (SEQ ID NO: 345).

[0020] FIG. 17 provides an amino acid sequence of an HLA Class II DQA1 α chain (SEQ ID NO: 346).

[0021] FIG. 18 provides an amino acid sequence of an HLA Class II DQA2 α chain (SEQ ID NO: 347).

[0022] FIG. 19A-19B provide amino acid sequences of HLA Class II DQB1 β chains (from top to bottom: SEQ ID NOs: 348-349).

[0023] FIG. 20A-20B provide amino acid sequence of HLA Class II DQB2 β chains (from top to bottom: SEQ ID NOs: 350-351).

[0024] FIG. 21A-21G provide amino acid sequences of immunoglobulin Fc polypeptides (from top to bottom: SEQ ID NOs: 352-363).

[0025] FIG. 22A-22L provide schematic depictions of exemplary multimeric T-cell modulatory antigen-presenting polypeptides of the present disclosure.

[0026] FIG. 23A-23I provide schematic depictions of exemplary single-chain T-cell modulatory antigen-presenting polypeptides of the present disclosure.

[0027] FIG. 24 depicts production of exemplary antigen-presenting polypeptides of the present disclosure.

[0028] FIG. 25A-25B provide the amino acid sequence (FIG. 25A; SEQ ID NO: 364) of an exemplary polypeptide chain of a multimeric T-cell modulator antigen-presenting polypeptide, and a nucleotide sequence (FIG. 25B; SEQ ID NO 365) encoding same.

[0029] FIG. 26A-26B provide the amino acid sequence (FIG. 26A; SEQ ID NO: 366) of an exemplary polypeptide chain of a multimeric T-cell modulator antigen-presenting polypeptide, and a nucleotide sequence (FIG. 26B; SEQ ID NO: 367) encoding same.

[0030] FIG. 27A-27B provide the amino acid sequence (FIG. 27A; SEQ ID NO: 368) of an exemplary single-chain T-cell modulator antigen-presenting polypeptide, and a nucleotide sequence (FIG. 27B; SEQ ID NO: 369) encoding same.

[0031] FIG. 28A-28B provide the amino acid sequence (FIG. 28A; SEQ ID NO: 370) of an exemplary single-chain T-cell modulator antigen-presenting polypeptide, and a nucleotide sequence (FIG. 28B; SEQ ID NO: 371) encoding same.

[0032] FIG. 29A-29B provide the amino acid sequence (FIG. 29A; SEQ ID NO: 372) of an exemplary single-chain T-cell modulator antigen-presenting polypeptide, and a nucleotide sequence (FIG. 29B; SEQ ID NO: 373) encoding same.

[0033] FIG. 30A-30B provide the amino acid sequence (FIG. 30A; SEQ ID NO: 374) of an exemplary polypeptide chain of a multimeric T-cell modulator antigen-presenting polypeptide, and a nucleotide sequence (FIG. 30B; SEQ ID NO: 375) encoding same.

[0034] FIG. 31A-31B provide the amino acid sequence (FIG. 31A; SEQ ID NO: 376) of an exemplary polypeptide chain of a multimeric T-cell modulator antigen-presenting polypeptide, and a nucleotide sequence (FIG. 31B; SEQ ID NO: 377) encoding same.

[0035] FIG. 32A-32B provide the amino acid sequence (FIG. 32A; SEQ ID NO: 378) of an exemplary polypeptide chain of a multimeric T-cell modulator antigen-presenting polypeptide, and a nucleotide sequence (FIG. 32B; SEQ ID NO: 379) encoding same.

[0036] FIG. 33A-33B provide the amino acid sequence (FIG. 33A; SEQ ID NO: 380) of an exemplary polypeptide chain of a multimeric T-cell modulator antigen-presenting polypeptide, and a nucleotide sequence (FIG. 33B; SEQ ID NO: 381) encoding same.

[0037] FIG. 34A-34B provide the amino acid sequence (FIG. 34A; SEQ ID NO: 382) of an exemplary polypeptide chain of a multimeric T-cell modulator antigen-presenting polypeptide, and a nucleotide sequence (FIG. 34B; SEQ ID NO: 383) encoding same.

[0038] FIG. 35A-35B provide the amino acid sequence (FIG. 35A; SEQ ID NO: 384) of an exemplary polypeptide chain of a multimeric T-cell modulator antigen-presenting polypeptide, and a nucleotide sequence (FIG. 35B; SEQ ID NO: 385) encoding same.

[0039] FIG. 36 provides a schematic depiction of MHC Class II alpha- and beta-chains with a peptide.

[0040] FIG. 37A-37C provide schematic depictions of examples of antigen-presenting polypeptides (APPs).

[0041] FIG. 38A-38B provide schematic depictions of APPs without immunomodulatory (MOD) polypeptides (FIG. 38A) and with a MOD polypeptide (FIG. 38B). The unmarked rectangle in FIG. 38 represents a dimerization domain (e.g., a bZIP polypeptide). In FIG. 8, the arrows pointing to the dashed lines indicate possible positions of a MOD polypeptide(s).

[0042] FIG. 39 provides a table showing associations of HLA class II alleles and haplotypes with risk of autoimmune disease. The table also provides autoantigens associated with the diseases listed.

### DEFINITIONS

[0043] The terms “polynucleotide” and “nucleic acid,” used interchangeably herein, refer to a polymeric form of nucleotides of any length, either ribonucleotides or deoxyribonucleotides. Thus, this term includes, but is not limited to, single-, double-, or multi-stranded DNA or RNA, genomic DNA, cDNA, DNA-RNA hybrids, or a polymer comprising purine and pyrimidine bases or other natural, chemically or biochemically modified, non-natural, or derivatized nucleotide bases.

[0044] The terms “peptide,” “polypeptide,” and “protein” are used interchangeably herein, and refer to a polymeric form of amino acids of any length, which can include coded and non-coded amino acids, chemically or biochemically modified or derivatized amino acids, and polypeptides having modified peptide backbones.

[0045] A polynucleotide or polypeptide has a certain percent “sequence identity” to another polynucleotide or polypeptide, meaning that, when aligned, that percentage of bases or amino acids are the same, and in the same relative position, when comparing the two sequences. Sequence identity can be determined in a number of different ways. To determine sequence identity, sequences can be aligned using various convenient methods and computer programs (e.g., BLAST, T-COFFEE, MUSCLE, MAFFT, etc.), available over the world wide web at sites including ncbi.nlm.nili.gov/BLAST, ebi.ac.uk/Tools/msa/tcoffee/, ebi.ac.uk/Tools/msa/muscle/, mafft.cbrc.jp/alignment/software/. See, e.g., Altschul et al. (1990), J. Mol. Bioi. 215:403-10.

[0046] The term “conservative amino acid substitution” refers to the interchangeability in proteins of amino acid residues having similar side chains. For example, a group of amino acids having aliphatic side chains consists of glycine, alanine, valine, leucine, and isoleucine; a group of amino acids having aliphatic-hydroxyl side chains consists of serine and threonine; a group of amino acids having amide containing side chains consisting of asparagine and glutamine; a group of amino acids having aromatic side chains consists of phenylalanine, tyrosine, and tryptophan; a group of amino acids having basic side chains consists of lysine, arginine, and histidine; a group of amino acids having acidic side chains consists of glutamate and aspartate; and a group of amino acids having sulfur containing side chains consists of cysteine and methionine. Exemplary conservative amino acid substitution groups are: valine-leucine-isoleucine, phenylalanine-tyrosine, lysine-arginine, alanine-valine-glycine, and asparagine-glutamine.

[0047] The term “binding,” as used herein (e.g. with reference to binding of a T-cell modulatory antigen-presenting polypeptide to a polypeptide (e.g., a T-cell receptor) on a T cell), refers to a non-covalent interaction between two molecules. Non-covalent binding refers to a direct association between two molecules, due to, for example, electrostatic, hydrophobic, ionic, and/or hydrogen-bond interactions, including interactions such as salt bridges and water bridges. Non-covalent binding interactions are generally characterized by a dissociation constant (K_{D}) of less than 10⁻⁶ M, less than 10⁻⁷ M, less than 10⁻⁸ M, less than 10⁻⁹ M, less than 10⁻¹⁰ M, less than 10⁻¹¹ M, less than 10⁻¹² M, less than 10⁻¹³ M, less than 10⁻¹⁴ M, or less than 10⁻¹⁵ M. “Affinity” refers to the strength of non-covalent binding, increased binding affinity being correlated with a lower K_{D}. “Specific binding” generally refers to binding with an affinity of at least about 10⁻⁷ M or greater, e.g., 5×10⁻⁷ M, 10⁻⁸M, 5×10⁻⁸M, 10⁻⁹ M, and greater. “Non-specific binding” generally refers to binding (e.g., the binding of a ligand to a moiety other than its designated binding site or receptor) with an affinity of less than about 10⁻⁷ M (e.g., binding with an affinity of 10⁻⁶ M, 10⁻⁵ M, 10⁻⁴ M). However, in some contexts, e.g., binding between a TCR and a peptide/MHC complex, “specific binding” can be in the range of from 1 μM to 100 μM, or from 100 μM to 1 mM. “Covalent binding” or “covalent bond,” as used herein, refers to the formation of one or more covalent chemical binds between two different molecules.

[0048] The term “immunological synapse” or “immune synapse” as used herein generally refers to the natural interface between two interacting immune cells of an adaptive immune response including, e.g., the interface between an antigen-presenting cell (APC) or target cell and an effector cell, e.g., a lymphocyte, an effector T cell, a natural killer cell, and the like. An immunological synapse between an APC and a T cell is generally initiated by the interaction of a T cell antigen receptor and major histocompatibility complex molecules, e.g., as described in Bromley et al., Annu Rev Immunol. 2001; 19:375-96; the disclosure of which is incorporated herein by reference in its entirety.

[0049] “T cell” includes all types of immune cells expressing CD3, including T-helper cells (CD4⁺ cells), cytotoxic T-cells (CD8⁺ cells), T-regulatory cells (Treg), and NK-T cells.

[0050] The term “immunomodulatory polypeptide” (also referred to as a “co-stimulatory polypeptide”), as used herein, includes a polypeptide on an antigen presenting cell (APC) (e.g., a dendritic cell, a B cell, and the like), or a portion of the polypeptide on an APC, that specifically binds a cognate co-immunomodulatory polypeptide on a T cell, thereby providing a signal which, in addition to the primary signal provided by, for instance, binding of a TCR/CD3 complex with a major histocompatibility complex (MHC) polypeptide loaded with peptide, mediates a T cell response, including, but not limited to, proliferation, activation, differentiation, and the like. An immunomodulatory polypeptide can include, but is not limited to, CD7, B7-1 (CD80), B7-2 (CD86), PD-L1, PD-L2, 4-1BBL, OX40L, Fas ligand (FasL), inducible costimulatory ligand (ICOS-L), intercellular adhesion molecule (ICAM), CD30L, CD40, CD70, CD83, HLA-G, lymphotoxin beta receptor, 3/TR6, ILT3, ILT4, HVEM, an agonist or antibody that binds Toll ligand receptor and a ligand that specifically binds with B7-H3. A co-stimulatory polypeptide also encompasses, inter alia, an antibody that specifically binds with a cognate co-stimulatory molecule present on a T cell, such as, but not limited to, IL-2, CD27, CD28, 4-1BB, OX40, CD30, CD40, PD-1, ICOS, lymphocyte function-associated antigen-1 (LFA-1), CD2, LIGHT, NKG2C, B7-H3, and a ligand that specifically binds to CD83.

[0051] As noted above, an “immunomodulatory polypeptide” (also referred to herein as a “MOD”) specifically binds a cognate co-immunomodulatory polypeptide on a T cell.

[0052] An “immunomodulatory domain” (“MOD”) of a TMAPP of the present disclosure binds a cognate co-immunomodulatory polypeptide, which may be present on a target T cell.

[0053] “Heterologous,” as used herein, means a nucleotide or polypeptide that is not found in the native nucleic acid or protein, respectively.

[0054] “Recombinant,” as used herein, means that a particular nucleic acid (DNA or RNA) is the product of various combinations of cloning, restriction, polymerase chain reaction (PCR) and/or ligation steps resulting in a construct having a structural coding or non-coding sequence distinguishable from endogenous nucleic acids found in natural systems. DNA sequences encoding polypeptides can be assembled from cDNA fragments or from a series of synthetic oligonucleotides, to provide a synthetic nucleic acid which is capable of being expressed from a recombinant transcriptional unit contained in a cell or in a cell-free transcription and translation system.

[0055] The terms “recombinant expression vector,” or “DNA construct” are used interchangeably herein to refer to a DNA molecule comprising a vector and at least one insert. Recombinant expression vectors are usually generated for the purpose of expressing and/or propagating the insert(s), or for the construction of other recombinant nucleotide sequences. The insert(s) may or may not be operably linked to a promoter sequence and may or may not be operably linked to DNA regulatory sequences.

[0056] As used herein, the term “affinity” refers to the equilibrium constant for the reversible binding of two agents (e.g., an antibody and an antigen) and is expressed as a dissociation constant (K_{D}). Affinity can be at least 1-fold greater, at least 2-fold greater, at least 3-fold greater, at least 4-fold greater, at least 5-fold greater, at least 6-fold greater, at least 7-fold greater, at least 8-fold greater, at least 9-fold greater, at least 10-fold greater, at least 20-fold greater, at least 30-fold greater, at least 40-fold greater, at least 50-fold greater, at least 60-fold greater, at least 70-fold greater, at least 80-fold greater, at least 90-fold greater, at least 100-fold greater, or at least 1,000-fold greater, or more, than the affinity of an antibody for unrelated amino acid sequences. Affinity of an antibody to a target protein can be, for example, from about 100 nanomolar (nM) to about 0.1 nM, from about 100 nM to about 1 picomolar (pM), or from about 100 nM to about 1 femtomolar (fM) or more. As used herein, the term “avidity” refers to the resistance of a complex of two or more agents to dissociation after dilution.

[0057] The term “binding” refers to a direct association between two molecules, due to, for example, covalent, electrostatic, hydrophobic, and ionic and/or hydrogen-bond interactions, including interactions such as salt bridges and water bridges. “Specific binding” refers to binding with an affinity of at least about 10⁻⁷ M or greater, e.g., 5×10⁻⁷ M, 10⁻⁸M, 5×10⁻⁸M, and greater. “Non-specific binding” refers to binding with an affinity of less than about 10⁻⁷ M, e.g., binding with an affinity of 10⁻⁶ M, 10⁻⁵ M, 10⁻⁴ M, etc.

[0058] The terms “treatment”, “treating” and the like are used herein to generally mean obtaining a desired pharmacologic and/or physiologic effect. The effect may be prophylactic in terms of completely or partially preventing a disease or symptom thereof and/or may be therapeutic in terms of a partial or complete cure for a disease and/or adverse effect attributable to the disease. “Treatment” as used herein covers any treatment of a disease or symptom in a mammal, and includes: (a) preventing the disease or symptom from occurring in a subject which may be predisposed to acquiring the disease or symptom but has not yet been diagnosed as having it; (b) inhibiting the disease or symptom, i.e., arresting its development; and/or (c) relieving the disease, i.e., causing regression of the disease. The therapeutic agent may be administered before, during or after the onset of disease or injury. The treatment of ongoing disease, where the treatment stabilizes or reduces the undesirable clinical symptoms of the patient, is of particular interest. Such treatment is desirably performed prior to complete loss of function in the affected tissues. The subject therapy will desirably be administered during the symptomatic stage of the disease, and in some cases after the symptomatic stage of the disease.

[0059] The terms “individual,” “subject,” “host,” and “patient,” are used interchangeably herein and refer to any mammalian subject for whom diagnosis, treatment, or therapy is desired. Mammals include, e.g., humans, non-human primates, rodents (e.g., rats; mice), lagomorphs (e.g., rabbits), ungulates (e.g., cows, sheep, pigs, horses, goats, and the like), etc.

[0060] Before the present invention is further described, it is to be understood that this invention is not limited to particular embodiments described, as such may, of course, vary. It is also to be understood that the terminology used herein is for the purpose of describing particular embodiments only, and is not intended to be limiting, since the scope of the present invention will be limited only by the appended claims.

[0061] Where a range of values is provided, it is understood that each intervening value, to the tenth of the unit of the lower limit unless the context clearly dictates otherwise, between the upper and lower limit of that range and any other stated or intervening value in that stated range, is encompassed within the invention. The upper and lower limits of these smaller ranges may independently be included in the smaller ranges, and are also encompassed within the invention, subject to any specifically excluded limit in the stated range. Where the stated range includes one or both of the limits, ranges excluding either or both of those included limits are also included in the invention.

[0062] Unless defined otherwise, all technical and scientific terms used herein have the same meaning as commonly understood by one of ordinary skill in the art to which this invention belongs. Although any methods and materials similar or equivalent to those described herein can also be used in the practice or testing of the present invention, the preferred methods and materials are now described. All publications mentioned herein are incorporated herein by reference to disclose and describe the methods and/or materials in connection with which the publications are cited.

[0063] It must be noted that as used herein and in the appended claims, the singular forms “a,” “an,” and “the” include plural referents unless the context clearly dictates otherwise. Thus, for example, reference to “a Treg” includes a plurality of such Tregs and reference to “the MHC Class II alpha chain” includes reference to one or more MHC Class II alpha chains and equivalents thereof known to those skilled in the art, and so forth. It is further noted that the claims may be drafted to exclude any optional element. As such, this statement is intended to serve as antecedent basis for use of such exclusive terminology as “solely,” “only” and the like in connection with the recitation of claim elements, or use of a “negative” limitation.

[0064] It is appreciated that certain features of the invention, which are, for clarity, described in the context of separate embodiments, may also be provided in combination in a single embodiment. Conversely, various features of the invention, which are, for brevity, described in the context of a single embodiment, may also be provided separately or in any suitable sub-combination. All combinations of the embodiments pertaining to the invention are specifically embraced by the present invention and are disclosed herein just as if each and every combination was individually and explicitly disclosed. In addition, all sub-combinations of the various embodiments and elements thereof are also specifically embraced by the present invention and are disclosed herein just as if each and every such sub-combination was individually and explicitly disclosed herein.

[0065] The publications discussed herein are provided solely for their disclosure prior to the filing date of the present application. Nothing herein is to be construed as an admission that the present invention is not entitled to antedate such publication by virtue of prior invention. Further, the dates of publication provided may be different from the actual publication dates which may need to be independently confirmed.

### DETAILED DESCRIPTION

[0066] The present disclosure provides T-cell modulatory antigen-presenting polypeptides (TMAPPs) that comprise: a) a first polypeptide comprising: i) a peptide epitope; and ii) a first MHC Class II polypeptide; and b) a second polypeptide comprising a second MHC Class II polypeptide, where the first and/or the second polypeptides comprises one or more immunomodulatory polypeptides. The present disclosure provides nucleic acids comprising nucleotide sequences encoding TMAPPs of the present disclosure, as well as cells genetically modified with the nucleic acids. A TMAPP of the present disclosure is useful for modulating activity of a T cell. Thus, the present disclosure provides methods of modulating activity of a T cell.

[0067] The present disclosure provides an antigen-presenting polypeptide (APP), where an APP of the present disclosure does not include an immunomodulatory polypeptide. An APP of the present disclosure can be a single chain polypeptide or a multi-chain (multimeric) polypeptide. An APP of the present disclosure is useful for diagnostic applications and therapeutic applications.

### T-Cell Modulatory Antigen-Presenting Polypeptides

[0068] The present disclosure provides T-cell modulatory antigen-presenting polypeptides (TMAPPs), including single-chain TMAPPs and multimeric TMAPPs. In some cases, a TMAPP of the present disclosure comprises two polypeptide chains and is sometimes referred to herein as a “multimeric T-cell modulatory antigen-presenting polypeptide.” In some cases, a TMAPP of the present disclosure comprises a single polypeptide chain. A TMAPP of the present disclosure is also referred to as a “synTac polypeptide.”

[0069] A TMAPP of the present disclosure comprises one or more immunomodulatory polypeptides. In some cases, a TMAPP of the present disclosure comprises a single immunomodulatory polypeptide. In some cases, a TMAPP of the present disclosure comprises two or more immunomodulatory polypeptides (e.g., 2, 3, 4, or 5 immunomodulatory polypeptides).

[0070] In some cases, a TMAPP of the present disclosure comprises two or more immunomodulatory polypeptides. In some cases, where a TMAPP of the present disclosure comprises a first polypeptide and a second polypeptide, the two or more immunomodulatory polypeptides are present in the first polypeptide chain only. In some cases, where a TMAPP of the present disclosure comprises a first polypeptide and a second polypeptide, the two or more immunomodulatory polypeptides are present in the second polypeptide chain only. In some cases, where a TMAPP of the present disclosure comprises a first polypeptide and a second polypeptide, at least one of the two or more immunomodulatory polypeptides are present in the first polypeptide chain; and at least one of the two or more immunomodulatory polypeptides are present in the second polypeptide chain.

[0071] In some cases, where a TMAPP of the present disclosure comprises two immunomodulatory polypeptides, the two immunomodulatory polypeptides have the same amino acid sequence, i.e., the TMAPP comprises two copies of an immunomodulatory polypeptide. In some cases, where a TMAPP of the present disclosure comprises two immunomodulatory polypeptides, the two immunomodulatory polypeptides do not have the same amino acid sequence; e.g., one of the two immunomodulatory polypeptides comprises a first amino acid sequence and the second of the two immunomodulatory polypeptides comprises a second amino acid sequence, where the first and the second amino acid sequences are not identical. In some cases, the first and the second amino acid sequences differ from one another in amino acid sequence by from 1 amino acid to 10 amino acids, from 10 amino acids to 25 amino acids, or more than 25 amino acids. In some cases, the first and the second amino acid sequences share less than 98%, less than 95%, less than 90%, less than 85%, less than 80%, less than 75%, or less than 70%, amino acid sequence identity with one another.

[0072] A TMAPP of the present disclosure modulates activity of a T cell. In some cases, a TMAPP of the present disclosure reduces activity of an autoreactive T cell and/or an autoreactive B cell. In some cases, a TMAPP of the present disclosure increases the number and/or activity of a regulator T cell (Treg), resulting in reduced activity of an autoreactive T cell and/or an autoreactive B cell.

[0073] Immunomodulatory polypeptides that are suitable for inclusion in a TMAPP of the present disclosure include, but are not limited to, IL-2, transforming growth factor-beta (TGFβ), JAG1, CD7, B7-1 (CD80), B7-2 (CD86), PD-L1, PD-L2, 4-1BBL, OX40L, Fas ligand (FasL), inducible costimulatory ligand (ICOS-L), intercellular adhesion molecule (ICAM), CD30L, CD40, CD70, CD83, HLA-G, MICA, MICB, HVEM, lymphotoxin beta receptor, 3/TR6, ILT3, and ILT4. In some cases, an immunomodulatory polypeptide suitable for inclusion in a TMAPP of the present disclosure is a variant that comprises from 1 to 10 amino acid substitutions relative to a wild-type or naturally-occurring immunomodulatory polypeptide, and that exhibits reduced affinity to its cognate co-immunomodulatory polypeptide (e.g., a co-immunomodulatory polypeptide present on the surface of a T cell), compared to the affinity of the wild-type or naturally-occurring immunomodulatory polypeptide for the cognate co-immunomodulatory polypeptide.

### Multimeric T-Cell Modulatory Antigen-Presenting Polypeptides

[0074] A TMAPP of the present disclosure comprises: i) a peptide epitope (a peptide recognized and bound by a TCR); ii) an MHC Class II α chain polypeptide; iii) an MHC Class II R chain polypeptide; and iv) an immunomodulatory polypeptide (also referred to herein as a “MOD polypeptide” or a “MOD domain”) In some cases, the TMAPP comprises two polypeptide chains; such a TMAPP is referred to herein as a multimeric TMAPP. A TMAPP of the present disclosure can further include one or both of: a dimerizer polypeptide; and an immunoglobulin scaffold (e.g., an Ig Fc polypeptide) or a non-immunoglobulin scaffold. Non-limiting example of multimeric TMAPPs of the present disclosure is schematically depicted in FIG. 1A-1E, FIG. 2A-2D, and FIG. 3A-3C.

[0075] In some cases, a TMAPP of the present disclosure comprises a single immunomodulatory polypeptide. In some cases, a TMAPP of the present disclosure comprises 2 copies of an immunomodulatory polypeptide. In some cases, a TMAPP of the present disclosure comprises 3 copies of an immunomodulatory polypeptide. Where a TMAPP of the present disclosure comprises 2 or 3 copies of an immunomodulatory polypeptide, in some cases, the 2 or 3 copies are in tandem. Where a TMAPP of the present disclosure comprises 2 or 3 copies of an immunomodulatory polypeptide, in some cases, the 2 or 3 copies are separated from one another by a linker.

[0076] A TMAPP of the present disclosure can include one or more linkers, where the one or more linkers are between one or more of: i) an MHC Class II polypeptide and an Ig Fc polypeptide, where such a linker is referred to herein as “L1”; ii) an immunomodulatory polypeptide and an MHC Class II polypeptide, where such a linker is referred to herein as “L2”; iii) a first immunomodulatory polypeptide and a second immunomodulatory polypeptide, where such a linker is referred to herein as “L3”; iv) a peptide antigen (“epitope”) and an MHC Class II polypeptide; v) an MHC Class II polypeptide and a dimerization polypeptide (e.g., a first or a second member of a dimerizing pair); and vi) a dimerization polypeptide (e.g., a first or a second member of a dimerizing pair) and an IgFc polypeptide. In some cases, an L1 linker comprises (GGGGS)n (SEQ ID NO: 1), where n is 1, 2, 3, 4, 5, 6, 7, or 8. In some cases, an L2 linker comprises (GGGGS)n (SEQ ID NO: 1), where n is 1, 2, 3, 4, 5, 6, 7, or 8. In some cases, an L3 linker comprises (GGGGS)n (SEQ ID NO: 1), where n is 1, 2, 3, 4, 5, 6, 7, or 8. In some cases, a linker comprises the amino acid sequence GGSAAAGG (SEQ ID NO: 2).

[0077] In some cases, a TMAPP of the present disclosure comprises: a) a first polypeptide comprising, in order from N-terminus to C-terminus: i) a peptide antigen (an “epitope”) that is recognized (e.g., is capable of being recognized and bound) by a TCR; ii) an MHC Class II β1 polypeptide; and iii) an MHC Class II β2 polypeptide; and b) a second polypeptide comprising: i) an immunomodulatory polypeptide; ii) an MHC Class II α1 polypeptide; and iii) an MHC Class II α2 polypeptide. In some cases, a TMAPP of the present disclosure comprises: a) a first polypeptide comprising, in order from N-terminus to C-terminus: i) a peptide antigen (an “epitope”) that is recognized (e.g., is capable of being recognized and bound) by a TCR; ii) an MHC Class II β1 polypeptide; and iii) an MHC Class II β2 polypeptide; and b) a second polypeptide comprising: i) an immunomodulatory polypeptide; ii) an MHC Class II α1 polypeptide; iii) an MHC Class II α2 polypeptide; and iv) an Ig Fc polypeptide. The arrangement (N-terminus to C-terminus order) of the immunomodulatory polypeptide, the MHC Class II α1 polypeptide, the MHC Class II α2 polypeptide, and the Ig Fc polypeptide, can vary. As one example of a possible arrangement, in some cases, a TMAPP of the present disclosure comprises: a) a first polypeptide comprising, in order from N-terminus to C-terminus: i) a peptide antigen (an “epitope”) that is recognized (e.g., is capable of being recognized and bound) by a TCR; ii) an MHC Class II β1 polypeptide; and iii) an MHC Class II β2 polypeptide; and b) a second polypeptide comprising, in order from N-terminus to C-terminus: i) an immunomodulatory polypeptide; ii) an MHC Class II α1 polypeptide; iii) an MHC Class II α2 polypeptide; and iv) an Ig Fc polypeptide. This arrangement is depicted schematically in FIG. 1A. As another example of a possible arrangement, in some cases, a TMAPP of the present disclosure comprises: a) a first polypeptide comprising, in order from N-terminus to C-terminus: i) a peptide antigen (an “epitope”) that is recognized (e.g., is capable of being recognized and bound) by a TCR; ii) an MHC Class II β1 polypeptide; and iii) an MHC Class II β2 polypeptide; and b) a second polypeptide comprising, in order from N-terminus to C-terminus: i) an MHC Class II α1 polypeptide; ii) an MHC Class II α2 polypeptide; iii) an Ig Fc polypeptide; and iv) an immunomodulatory polypeptide. This arrangement is depicted schematically in FIG. 1B. As another example of a possible arrangement, in some cases, a TMAPP of the present disclosure comprises: a) a first polypeptide comprising, in order from N-terminus to C-terminus: i) a peptide antigen (an “epitope”) that is recognized (e.g., is capable of being recognized and bound) by a TCR; ii) an MHC Class II β1 polypeptide; and iii) an MHC Class II β2 polypeptide; and b) a second polypeptide comprising, in order from N-terminus to C-terminus: i) an MHC Class II α1 polypeptide; ii) an MHC Class II α2 polypeptide; iii) an immunomodulatory polypeptide; and iv) an Ig Fc polypeptide. This arrangement is depicted schematically in FIG. 1C. The immunomodulatory polypeptide(s) can be on the same polypeptide chain as the MHC Class II α1 and α2 polypeptides, as illustrated schematically in FIG. 1A-1C. Alternatively, the peptide antigen (“epitope”) can be on the same polypeptide chain as the MHC Class II β1 and β2 polypeptides, as illustrated schematically in FIG. 1D and FIG. 1E. For example, in some cases, a TMAPP of the present disclosure comprises: a) a first polypeptide comprising, in order from N-terminus to C-terminus: i) an immunomodulatory polypeptide; ii) a peptide antigen (an “epitope”) that is recognized (e.g., is capable of being recognized and bound) by a TCR; iii) an MHC Class II β1 polypeptide; and iv) an MHC Class II β2 polypeptide; and b) a second polypeptide comprising, in order from N-terminus to C-terminus: i) an MHC Class II α1 polypeptide; ii) an MHC Class II α2 polypeptide; and iii) an Ig Fc polypeptide. This arrangement is depicted schematically in FIG. 1D. As another example, in some cases, a TMAPP of the present disclosure comprises: a) a first polypeptide comprising, in order from N-terminus to C-terminus: i) a peptide antigen (an “epitope”) that is recognized (e.g., is capable of being recognized and bound) by a TCR; ii) an MHC Class II β1 polypeptide; iii) an MHC Class II β2 polypeptide; and iv) an immunomodulatory polypeptide; and b) a second polypeptide comprising, in order from N-terminus to C-terminus: i) an MHC Class II α1 polypeptide; ii) an MHC Class II α2 polypeptide; and iii) an Ig Fc polypeptide. This arrangement is depicted schematically in FIG. 1E. In any one of the above embodiments, the TMAPP can include a single immunomodulatory polypeptide. In any one of the above embodiments, the TMAPP can include 2 copies of the immunomodulatory polypeptide; the 2 copies can be in tandem, or can be separated by a linker. In any one of the above embodiments, the TMAPP can include 3 copies of the immunomodulatory polypeptide; the 3 copies can be in tandem, or can be separated by a linker. Where a TMAPP of the present disclosure comprises two immunomodulatory polypeptides, in some cases, the first immunomodulatory polypeptide is linked to the second immunomodulatory polypeptide by a linker (an “L3” linker); e.g., a linker of from about 2 amino acids to 50 amino acids in length. Suitable L3 linkers include (GGGGS)n (SEQ ID NO: 1), where n is 1, 2, 3, 4, 5, 6, 7, or 8. In some cases, the TMAPP comprises a linker (an “L1”) between the MHC polypeptide and the Ig Fc polypeptide; where exemplary suitable linkers include (GGGGS)n (SEQ ID NO: 1), where n is 1, 2, 3, 4, 5, 6, 7, or 8. In some cases, the TMAPP comprises a linker (an “L2”) between the immunomodulatory polypeptide and the MHC polypeptide, where exemplary suitable linkers include (GGGGS)n (SEQ ID NO: 1), where n is 1, 2, 3, 4, 5, 6, 7, or 8. In some cases, where the TMAPP comprises two immunomodulatory polypeptides, in some cases, the two immunomodulatory polypeptides are separated by a linker (an “L3); where exemplary suitable linkers include (GGGGS)n (SEQ ID NO: 1), where n is 1, 2, 3, 4, 5, 6, 7, or 8. In some cases, the linker between any two components of the TMAPP comprises the amino acid sequence GGSAAAGG (SEQ ID NO: 2). In any of the above embodiments, in some cases, the Ig Fc is an IgG1 Fc polypeptide. In any of the above embodiments, in some cases, the Ig Fc is an IgG4 Fc polypeptide. In any of the above embodiments, in some cases, the immunomodulatory polypeptide is a PD-L1 polypeptide. In any of the above embodiments, in some cases, the immunomodulatory polypeptide is a TGF-β polypeptide. In any of the above embodiments, in some cases, the immunomodulatory polypeptide is a FasL polypeptide. In some cases, the epitope is an auto-epitope (an epitope of a self antigen).

[0078] The two polypeptide chains of a TMAPP of the present disclosure can be covalently linked, e.g., via a disulfide bond. The two polypeptide chains of a TMAPP of the present disclosure can also associate with one another non-covalently. The two polypeptide chains of a TMAPP of the present disclosure can be linked via interaction between a first dimerization domain present in the first polypeptide, and a second dimerization domain present in the second polypeptide. For example, the first polypeptide chain of a TMAPP of the present disclosure can include an Ig CH1 polypeptide as a first dimerization domain; and the second polypeptide chain of a TMAPP of the present disclosure can include the constant region of an immunoglobulin κ chain, as the second dimerization domain.

[0079] A suitable Ig CH1 polypeptide has a length of from about 90 amino acids to about 120 amino acids (e.g., from about 90 amino acids to about 95 amino acids, from about 95 amino acids to about 100 amino acids, from about 100 amino acids to about 105 amino acids, from about 105 amino acids to about 110 amino acids, from about 110 amino acids to about 115 amino acids, or from about 110 amino acids to about 120 amino acids); and can comprise an amino acid sequence having at least 60%, at least 70%, at least 80%, at least 90%, at least 95%, at least 98%, at least 99%, or 100%, amino acid sequence identity to the following CH1 amino acid sequence:

(SEQ ID NO: 3)
ASTKGPSVFPLAPSSKSTSGGTAALGCLVKDYFPEPVTVSWNSGALTSG
VHTFPAVLQSSGLYSLSSVVTVPSSSLGTQTYICNVNHKPSNTKVDKKV
EPKSCDKT.

[0080] A suitable Ig κ chain constant region polypeptide has a length of from about 90 amino acids to about 120 amino acids (e.g., from about 90 amino acids to about 95 amino acids, from about 95 amino acids to about 100 amino acids, from about 100 amino acids to about 105 amino acids, from about 105 amino acids to about 110 amino acids, from about 110 amino acids to about 115 amino acids, or from about 110 amino acids to about 120 amino acids); and can comprise an amino acid sequence having at least 60%, at least 70%, at least 80%, at least 90%, at least 95%, at least 98%, at least 99%, or 100%, amino acid sequence identity to the following κ chain constant region amino acid sequence:

(SEQ ID NO: 4)
TVAAPSVFIFPPSDEQLKSGTASVVCLLNNFYPREAKVQWKVDNALQSG
NSQESVTEQDSKDSTYSLSSTLTLSKADYEKHKVYACEVTHQGLSSPVT
KSFNRGEC.

[0081] In some cases, a TMAPP of the present disclosure comprises: a) a first polypeptide comprising, in order from N-terminus to C-terminus: i) a peptide antigen (an “epitope”) that is recognized (e.g., is capable of being recognized and bound) by a TCR; ii) an MHC Class II β1 polypeptide; iii) an MHC Class II β2 polypeptide; and iv) an Ig κ chain constant region polypeptide; and b) a second polypeptide comprising: i) an immunomodulatory polypeptide; ii) an MHC Class II α1 polypeptide; iii) an MHC Class II α2 polypeptide; and iv) a CH1 polypeptide. In some cases, a TMAPP of the present disclosure comprises: a) a first polypeptide comprising, in order from N-terminus to C-terminus: i) a peptide antigen (an “epitope”) that is recognized (e.g., is capable of being recognized and bound) by a TCR; ii) an MHC Class II β1 polypeptide; iii) an MHC Class II β2 polypeptide; and iv) an Ig κ chain constant region polypeptide; and b) a second polypeptide comprising: i) an immunomodulatory polypeptide; ii) an MHC Class II α1 polypeptide; iii) an MHC Class II α2 polypeptide; iv) a CH1 polypeptide; and v) an Ig Fc polypeptide. In some cases, a TMAPP of the present disclosure comprises: a) a first polypeptide comprising, in order from N-terminus to C-terminus: i) a peptide antigen (an “epitope”) that is recognized (e.g., is capable of being recognized and bound) by a TCR; ii) an MHC Class II β1 polypeptide; iii) an MHC Class II β2 polypeptide; and iv) an Ig κ chain constant region polypeptide; and b) a second polypeptide comprising, in order from N-terminus to C-terminus: i) an immunomodulatory polypeptide; ii) an MHC Class II α1 polypeptide; iii) an MHC Class II α2 polypeptide; iv) a CH1 polypeptide; and v) an Ig Fc polypeptide. An example of such a TMAPP is depicted schematically in FIG. 2A. In some cases, a TMAPP of the present disclosure comprises: a) a first polypeptide comprising, in order from N-terminus to C-terminus: i) a peptide antigen (an “epitope”) that is recognized (e.g., is capable of being recognized and bound) by a TCR; ii) an MHC Class II β1 polypeptide; iii) an MHC Class II β2 polypeptide; and iv) an Ig κ chain constant region polypeptide; and b) a second polypeptide comprising, in order from N-terminus to C-terminus: i) an MHC Class II α1 polypeptide; ii) an MHC Class II α2 polypeptide; iii) an immunomodulatory polypeptide; iv) a CH1 polypeptide; and v) an Ig Fc polypeptide. An example of such a TMAPP is depicted schematically in FIG. 2B. As another example of a possible arrangement, in some cases, a TMAPP of the present disclosure comprises: a) a first polypeptide comprising, in order from N-terminus to C-terminus: i) a peptide antigen (an “epitope”) that is recognized (e.g., is capable of being recognized and bound) by a TCR; ii) an MHC Class II β1 polypeptide; iii) an MHC Class II β2 polypeptide; and iv) an Ig κ constant region polypeptide; and b) a second polypeptide comprising, in order from N-terminus to C-terminus: i) an MHC Class II α1 polypeptide; ii) an MHC Class II α2 polypeptide; iii) a CH1 polypeptide; iv) an immunomodulatory polypeptide; and v) an Ig Fc polypeptide. This arrangement is depicted schematically in FIG. 2C. In some cases, a TMAPP of the present disclosure comprises: a) a first polypeptide comprising, in order from N-terminus to C-terminus: i) a peptide antigen (an “epitope”) that is recognized (e.g., is capable of being recognized and bound) by a TCR; ii) an MHC Class II β1 polypeptide; iii) an MHC Class II β2 polypeptide; and iv) an Ig κ chain constant region polypeptide; and b) a second polypeptide comprising, in order from N-terminus to C-terminus: i) an MHC Class II α1 polypeptide; ii) an MHC Class II α2 polypeptide; iii) a CH1 polypeptide; iv an Ig Fc polypeptide; and v) an immunomodulatory polypeptide. An example of such a TMAPP is depicted schematically in FIG. 2D. In any one of the above embodiments, the TMAPP can include a single immunomodulatory polypeptide. In any one of the above embodiments, the TMAPP can include 2 copies of the immunomodulatory polypeptide; the 2 copies can be in tandem, or can be separated by a linker. In any one of the above embodiments, the TMAPP can include 3 copies of the immunomodulatory polypeptide; the 3 copies can be in tandem, or can be separated by a linker. Where a TMAPP of the present disclosure comprises two immunomodulatory polypeptides, in some cases, the first immunomodulatory polypeptide is linked to the second immunomodulatory polypeptide by a linker (an “L3” linker); e.g., a linker of from about 2 amino acids to 50 amino acids in length. Suitable L3 linkers include (GGGGS)n (SEQ ID NO: 1), where n is 1, 2, 3, 4, 5, 6, 7, or 8. In some cases, the TMAPP comprises a linker (an “L1”) between the MHC polypeptide and the Ig Fc polypeptide; where exemplary suitable linkers include (GGGGS)n (SEQ ID NO: 1), where n is 1, 2, 3, 4, 5, 6, 7, or 8. In some cases, the TMAPP comprises a linker (an “L2”) between the immunomodulatory polypeptide and the MHC polypeptide, where exemplary suitable linkers include (GGGGS)n (SEQ ID NO: 1), where n is 1, 2, 3, 4, 5, 6, 7, or 8. In some cases, where the TMAPP comprises two immunomodulatory polypeptides, in some cases, the two immunomodulatory polypeptides are separated by a linker (an “L3); where exemplary suitable linkers include (GGGGS)n (SEQ ID NO: 1), where n is 1, 2, 3, 4, 5, 6, 7, or 8. In some cases, the linker between any two components of the TMAPP comprises the amino acid sequence GGSAAAGG (SEQ ID NO: 2). In any of the above embodiments, in some cases, the Ig Fc is an IgG1 Fc polypeptide. In any of the above embodiments, in some cases, the Ig Fc is an IgG4 Fc polypeptide. In any of the above embodiments, in some cases, the immunomodulatory polypeptide is a PD-L1 polypeptide. In any of the above embodiments, in some cases, the immunomodulatory polypeptide is a TGF-β polypeptide. In any of the above embodiments, in some cases, the immunomodulatory polypeptide is a FasL polypeptide. In some cases, the epitope is an auto-epitope (an epitope of a self antigen).

[0082] In some cases, a TMAPP of the present disclosure comprises: a) a first polypeptide comprising: i) a peptide antigen (an “epitope”) that is recognized (e.g., is capable of being recognized and bound) by a TCR; ii) an MHC Class II β1 polypeptide; iii) an MHC Class II β2 polypeptide; iv) an immunomodulatory polypeptide; and v) an Ig κ chain constant region polypeptide; and b) a second polypeptide comprising: i) an MHC Class II α1 polypeptide; ii) an MHC Class II α2 polypeptide; and iii) a CH1 polypeptide. In some cases, a TMAPP of the present disclosure comprises: a) a first polypeptide comprising: i) a peptide antigen (an “epitope”) that is recognized (e.g., is capable of being recognized and bound) by a TCR; ii) an MHC Class II β1 polypeptide; iii) an MHC Class II β2 polypeptide; iv) an immunomodulatory polypeptide; and v) an Ig κ chain constant region polypeptide; and b) a second polypeptide comprising: i) an MHC Class II α1 polypeptide; ii) an MHC Class II α2 polypeptide; iii) a CH1 polypeptide; and v) an Ig Fc polypeptide. As an example, in some cases, a TMAPP of the present disclosure comprises, in order from N-terminus to C-terminus: i) an immunomodulatory polypeptide; ii) a peptide antigen (an “epitope”) that is recognized (e.g., is capable of being recognized and bound) by a TCR; iii) an MHC Class II β1 polypeptide; iv) an MHC Class II β2 polypeptide; and v) an Ig κ chain constant region polypeptide; and b) a second polypeptide comprising, in order from N-terminus to C-terminus: i) an MHC Class II α1 polypeptide; ii) an MHC Class II α2 polypeptide; iii) a CH1 polypeptide; and v) an Ig Fc polypeptide. Such a TMAPP is depicted schematically in FIG. 3A. As another example, in some cases, a TMAPP of the present disclosure comprises, in order from N-terminus to C-terminus: i) a peptide antigen (an “epitope”) that is recognized (e.g., is capable of being recognized and bound) by a TCR; ii) an MHC Class II β1 polypeptide; iii) an MHC Class II β2 polypeptide; iv) an immunomodulatory polypeptide; and v) an Ig κ chain constant region polypeptide; and b) a second polypeptide comprising, in order from N-terminus to C-terminus: i) an MHC Class II α1 polypeptide; ii) an MHC Class II α2 polypeptide; iii) a CH1 polypeptide; and v) an Ig Fc polypeptide. Such a TMAPP is depicted schematically in FIG. 3B. As another example, in some cases, a TMAPP of the present disclosure comprises, in order from N-terminus to C-terminus: i) a peptide antigen (an “epitope”) that is recognized (e.g., is capable of being recognized and bound) by a TCR; ii) an MHC Class II β1 polypeptide; iii) an MHC Class II β2 polypeptide; iv) an Ig κ chain constant region polypeptide; and v) an immunomodulatory polypeptide; and b) a second polypeptide comprising, in order from N-terminus to C-terminus: i) an MHC Class II α1 polypeptide; ii) an MHC Class II α2 polypeptide; iii) a CH1 polypeptide; and v) an Ig Fc polypeptide. Such a TMAPP is depicted schematically in FIG. 3C. In any one of the above embodiments, the TMAPP can include a single immunomodulatory polypeptide. In any one of the above embodiments, the TMAPP can include 2 copies of the immunomodulatory polypeptide; the 2 copies can be in tandem, or can be separated by a linker. In any one of the above embodiments, the TMAPP can include 3 copies of the immunomodulatory polypeptide; the 3 copies can be in tandem, or can be separated by a linker. Where a TMAPP of the present disclosure comprises two immunomodulatory polypeptides, in some cases, the first immunomodulatory polypeptide is linked to the second immunomodulatory polypeptide by a linker (an “L3” linker); e.g., a linker of from about 2 amino acids to 50 amino acids in length. Suitable L3 linkers include (GGGGS)n (SEQ ID NO: 1), where n is 1, 2, 3, 4, 5, 6, 7, or 8. In some cases, the TMAPP comprises a linker (an “L1”) between the MHC polypeptide and the Ig Fc polypeptide; where exemplary suitable linkers include (GGGGS)n (SEQ ID NO: 1), where n is 1, 2, 3, 4, 5, 6, 7, or 8. In some cases, the TMAPP comprises a linker (an “L2”) between the immunomodulatory polypeptide and the MHC polypeptide, where exemplary suitable linkers include (GGGGS)n (SEQ ID NO: 1), where n is 1, 2, 3, 4, 5, 6, 7, or 8. In some cases, where the TMAPP comprises two immunomodulatory polypeptides, in some cases, the two immunomodulatory polypeptides are separated by a linker (an “L3); where exemplary suitable linkers include (GGGGS)n (SEQ ID NO: 1), where n is 1, 2, 3, 4, 5, 6, 7, or 8. In some cases, the linker between any two components of the TMAPP comprises the amino acid sequence GGSAAAGG (SEQ ID NO: 2). In any of the above embodiments, in some cases, the Ig Fc is an IgG1 Fc polypeptide. In any of the above embodiments, in some cases, the Ig Fc is an IgG4 Fc polypeptide. In any of the above embodiments, in some cases, the immunomodulatory polypeptide is a PD-L1 polypeptide. In any of the above embodiments, in some cases, the immunomodulatory polypeptide is a TGF-β polypeptide. In any of the above embodiments, in some cases, the immunomodulatory polypeptide is a FasL polypeptide. In some cases, the epitope is an auto-epitope (an epitope of a self antigen).

[0083] In some cases, a TMAPP of the present disclosure comprises: a) a first polypeptide comprising, in order from N-terminus to C-terminus: i) a peptide antigen (an “epitope”) that is recognized (e.g., is capable of being recognized and bound) by a TCR; ii) an MHC Class II β1 polypeptide; iii) an MHC Class II α1 polypeptide; and iv) an MHC Class II α2 polypeptide; and b) a second polypeptide comprising: i) an immunomodulatory polypeptide; and ii) an MHC Class II β2 polypeptide. In some cases, the second polypeptide comprises, in order from N-terminus to C-terminus: i) an immunomodulatory polypeptide; and ii) an MHC Class II β2 polypeptide. In some cases, a TMAPP of the present disclosure comprises: a) a first polypeptide comprising, in order from N-terminus to C-terminus: i) a peptide antigen (an “epitope”) that is recognized (e.g., is capable of being recognized and bound) by a TCR; ii) an MHC Class II β1 polypeptide; iii) an MHC Class II α1 polypeptide; iv) an MHC Class II α2 polypeptide; and v) an immunoglobulin or non-immunoglobulin scaffold polypeptide; and b) a second polypeptide comprising: i) an immunomodulatory polypeptide; and ii) an MHC Class II β2 polypeptide. In some cases, the second polypeptide comprises, in order from N-terminus to C-terminus: i) an immunomodulatory polypeptide; and ii) an MHC Class II β2 polypeptide. In some cases, a TMAPP of the present disclosure comprises: a) a first polypeptide comprising, in order from N-terminus to C-terminus: i) a peptide antigen (an “epitope”) that is recognized (e.g., is capable of being recognized and bound) by a TCR; ii) an MHC Class II β1 polypeptide; iii) an MHC Class II α1 polypeptide; iv) an MHC Class II α2 polypeptide; and v) an Ig Fc polypeptide; and b) a second polypeptide comprising: i) an immunomodulatory polypeptide; and ii) an MHC Class II β2 polypeptide. In some cases, the second polypeptide comprises, in order from N-terminus to C-terminus: i) an immunomodulatory polypeptide; and ii) an MHC Class II β2 polypeptide. In some cases, a TMAPP of the present disclosure comprises: a) a first polypeptide comprising, in order from N-terminus to C-terminus: i) a peptide antigen (an “epitope”) that is recognized (e.g., is capable of being recognized and bound) by a TCR; ii) an MHC Class II β1 polypeptide; iii) an MHC Class II α1 polypeptide; iv) an MHC Class II α2 polypeptide; and v) a first member of a dimerizer pair; and b) a second polypeptide comprising: i) an immunomodulatory polypeptide; ii) an MHC Class II β2 polypeptide; iii) a second member of the dimerizer pair. In some cases, the second polypeptide comprises, in order from N-terminus to C-terminus: i) an immunomodulatory polypeptide; ii) an MHC Class II β2 polypeptide; iii) a second member of the dimerizer pair. In some cases, a TMAPP of the present disclosure comprises: a) a first polypeptide comprising, in order from N-terminus to C-terminus: i) a peptide antigen (an “epitope”) that is recognized (e.g., is capable of being recognized and bound) by a TCR; ii) an MHC Class II β1 polypeptide; iii) an MHC Class II α1 polypeptide; iv) an MHC Class II α2 polypeptide; and v) a first leucine zipper polypeptide; and b) a second polypeptide comprising: i) an immunomodulatory polypeptide; ii) an MHC Class II β2 polypeptide; and iii) a second leucine zipper polypeptide. In some cases, the second polypeptide comprises, in order from N-terminus to C-terminus: i) an immunomodulatory polypeptide; ii) an MHC Class II β2 polypeptide; and iii) a second leucine zipper polypeptide. In some cases, a TMAPP of the present disclosure comprises: a) a first polypeptide comprising, in order from N-terminus to C-terminus: i) a peptide antigen (an “epitope”) that is recognized (e.g., is capable of being recognized and bound) by a TCR; ii) an MHC Class II β1 polypeptide; iii) an MHC Class II α1 polypeptide; iv) an MHC Class II α2 polypeptide; v) a first leucine zipper polypeptide; and vi) an Ig Fc polypeptide; and b) a second polypeptide comprising: i) an immunomodulatory polypeptide; ii) an MHC Class II β2 polypeptide; and iii) a second leucine zipper polypeptide. In some cases, the second polypeptide comprises, in order from N-terminus to C-terminus: i) an immunomodulatory polypeptide; ii) an MHC Class II β2 polypeptide; and iii) a second leucine zipper polypeptide. In any one of the above embodiments, the TMAPP can include a single immunomodulatory polypeptide. In any one of the above embodiments, the TMAPP can include 2 copies of the immunomodulatory polypeptide; the 2 copies can be in tandem, or can be separated by a linker. In any one of the above embodiments, the TMAPP can include 3 copies of the immunomodulatory polypeptide; the 3 copies can be in tandem, or can be separated by a linker. For example, in some cases, a TMAPP of the present disclosure comprises: a) a first polypeptide comprising, in order from N-terminus to C-terminus: i) a peptide antigen (an “epitope”) that is recognized (e.g., is capable of being recognized and bound) by a TCR; ii) an MHC Class II β1 polypeptide; iii) an MHC Class II α1 polypeptide; iv) an MHC Class II α2 polypeptide; v) a first leucine zipper polypeptide; and vi) an Ig Fc polypeptide; and b) a second polypeptide comprising: i) a first immunomodulatory polypeptide; ii) a second immunomodulatory polypeptide; iii) an MHC Class II β2 polypeptide; and iv) a second leucine zipper polypeptide. In some cases, the second polypeptide comprises, in order from N-terminus to C-terminus: i) a first immunomodulatory polypeptide; ii) a second immunomodulatory polypeptide; iii) an MHC Class II β2 polypeptide; and iv) a second leucine zipper polypeptide. In some cases, the first and the second immunomodulatory polypeptides comprise the same amino acid sequences. As another example, in some cases, a TMAPP of the present disclosure comprises: a) a first polypeptide comprising, in order from N-terminus to C-terminus: i) a peptide antigen (an “epitope”) that is recognized (e.g., is capable of being recognized and bound) by a TCR; ii) an MHC Class II β1 polypeptide; iii) an MHC Class II α1 polypeptide; iv) an MHC Class II α2 polypeptide; and v) an Ig Fc polypeptide; and b) a second polypeptide comprising: i) a first immunomodulatory polypeptide; ii) a second immunomodulatory polypeptide; and iii) an MHC Class II β2 polypeptide. In some cases, the second polypeptide comprises, in order from N-terminus to C-terminus: i) a first immunomodulatory polypeptide; ii) a second immunomodulatory polypeptide; and iii) an MHC Class II β2 polypeptide. In some cases, the first and the second immunomodulatory polypeptides comprise the same amino acid sequences. In some cases, a TMAPP of the present disclosure comprises: a) a first polypeptide comprising, in order from N-terminus to C-terminus: i) a peptide antigen (an “epitope”) that is recognized (e.g., is capable of being recognized and bound) by a TCR; ii) an MHC Class II β1 polypeptide; iii) an MHC Class II α1 polypeptide; and iv) an MHC Class II α2 polypeptide; and b) a second polypeptide comprising: i) an immunomodulatory polypeptide; ii) an MHC Class II β2 polypeptide; and iii) an Ig Fc polypeptide. In some cases, the second polypeptide comprises, in order from N-terminus to C-terminus: i) an immunomodulatory polypeptide; ii) an MHC Class II β2 polypeptide; and iii) an Ig Fc polypeptide. In some cases, a TMAPP of the present disclosure comprises: a) a first polypeptide comprising, in order from N-terminus to C-terminus: i) a peptide antigen (an “epitope”) that is recognized (e.g., is capable of being recognized and bound) by a TCR; ii) an MHC Class II β1 polypeptide; iii) an MHC Class II α1 polypeptide; and iv) an MHC Class II α2 polypeptide; and b) a second polypeptide comprising: i) a first immunomodulatory polypeptide; ii) a second immunomodulatory polypeptide; iii) an MHC Class II β2 polypeptide; iv) an Ig Fc polypeptide. In some cases, the second polypeptide comprises, in order from N-terminus to C-terminus: i) a first immunomodulatory polypeptide; ii) a second immunomodulatory polypeptide; iii) an MHC Class II β2 polypeptide; iv) an Ig Fc polypeptide. In some cases, the first and the second immunomodulatory polypeptides comprise the same amino acid sequence. In some cases, a TMAPP of the present disclosure comprises: a) a first polypeptide comprising, in order from N-terminus to C-terminus: i) an immunomodulatory polypeptide; ii) an MHC Class II β1 polypeptide; iii) an MHC Class II α1 polypeptide; and iv) an MHC Class II α2 polypeptide; and b) a second polypeptide comprising: i) a peptide antigen (an “epitope”) that is recognized (e.g., is capable of being recognized and bound) by a TCR; ii) an MHC Class II β2 polypeptide; and iii) an Ig Fc polypeptide. In some cases, the second polypeptide comprises, in order from N-terminus to C-terminus: i) a peptide antigen (an “epitope”) that is recognized (e.g., is capable of being recognized and bound) by a TCR; ii) an MHC Class II β2 polypeptide; and iii) an Ig Fc polypeptide. In some cases, a TMAPP of the present disclosure comprises: a) a first polypeptide comprising, in order from N-terminus to C-terminus: i) a first immunomodulatory polypeptide; ii) a second immunomodulatory polypeptide; iii) an MHC Class II β1 polypeptide; iv) an MHC Class II α1 polypeptide; and v) an MHC Class II α2 polypeptide; and b) a second polypeptide comprising, in order from N-terminus to C-terminus: i) a peptide antigen (an “epitope”) that is recognized (e.g., is capable of being recognized and bound) by a TCR; ii) an MHC Class II β2 polypeptide; and iii) an Ig Fc polypeptide. In some cases, the second polypeptide comprises, in order from N-terminus to C-terminus: i) a peptide antigen (an “epitope”) that is recognized (e.g., is capable of being recognized and bound) by a TCR; ii) an MHC Class II β2 polypeptide; and iii) an Ig Fc polypeptide. In some cases, the first and the second immunomodulatory polypeptides comprise the same amino acid sequence. Where a TMAPP of the present disclosure comprises two immunomodulatory polypeptides, in some cases, the first immunomodulatory polypeptide is linked to the second immunomodulatory polypeptide by a linker (an “L3” linker); e.g., a linker of from about 2 amino acids to 50 amino acids in length. Suitable L3 linkers include (GGGGS)n (SEQ ID NO: 1), where n is 1, 2, 3, 4, 5, 6, 7, or 8. In some cases, the TMAPP comprises a linker (an “L1”) between the MHC polypeptide and the Ig Fc polypeptide; where exemplary suitable linkers include (GGGGS)n (SEQ ID NO: 1), where n is 1, 2, 3, 4, 5, 6, 7, or 8. In some cases, the TMAPP comprises a linker (an “L2”) between the immunomodulatory polypeptide and the MHC polypeptide, where exemplary suitable linkers include (GGGGS)n (SEQ ID NO: 1), where n is 1, 2, 3, 4, 5, 6, 7, or 8. In some cases, where the TMAPP comprises two immunomodulatory polypeptides, in some cases, the two immunomodulatory polypeptides are separated by a linker (an “L3); where exemplary suitable linkers include (GGGGS)n (SEQ ID NO: 1), where n is 1, 2, 3, 4, 5, 6, 7, or 8. In some cases, the linker between any two components of the TMAPP comprises the amino acid sequence GGSAAAGG (SEQ ID NO: 2). In any of the above embodiments, in some cases, the Ig Fc is an IgG1 Fc polypeptide. In any of the above embodiments, in some cases, the Ig Fc is an IgG4 Fc polypeptide. In any of the above embodiments, in some cases, the immunomodulatory polypeptide is a PD-L1 polypeptide. In any of the above embodiments, in some cases, the immunomodulatory polypeptide is a TGF-β polypeptide. In any of the above embodiments, in some cases, the immunomodulatory polypeptide is a FasL polypeptide. In some cases, the epitope is an auto-epitope (an epitope of a self antigen).

[0084] In some cases, a TMAPP of the present disclosure comprises: a) a first polypeptide comprising, in order from N-terminus to C-terminus: i) a peptide antigen (an “epitope”) that is recognized (e.g., is capable of being recognized and bound) by a TCR; ii) an MHC Class II α1 polypeptide; iii) an MHC Class II α2 polypeptide; and iv) an immunoglobulin or non-immunoglobulin scaffold polypeptide; and b) a second polypeptide comprising, in order from N-terminus to C-terminus: i) an immunomodulatory polypeptide; ii) an MHC Class II β1 polypeptide; and iii) an MHC Class II β2 polypeptide. In some cases, a TMAPP of the present disclosure comprises: a) a first polypeptide comprising, in order from N-terminus to C-terminus: i) an immunomodulatory polypeptide; ii) an MHC Class II α1 polypeptide; and iii) an MHC Class II α2 polypeptide; and iv) an immunoglobulin or non-immunoglobulin scaffold polypeptide; and b) a second polypeptide comprising, in order from N-terminus to C-terminus: i) a peptide antigen (an “epitope”) that is recognized (e.g., is capable of being recognized and bound) by a TCR; ii) an MHC Class II β1 polypeptide; and iii) an MHC Class II β2 polypeptide. In some cases, a TMAPP of the present disclosure comprises: a) a first polypeptide comprising, in order from N-terminus to C-terminus: i) a peptide antigen (an “epitope”) that is recognized (e.g., is capable of being recognized and bound) by a TCR; ii) an MHC Class II α1 polypeptide; and iii) an MHC Class II α2 polypeptide; and b) a second polypeptide comprising, in order from N-terminus to C-terminus: i) an immunomodulatory polypeptide; ii) an MHC Class II β1 polypeptide; iii) an MHC Class II β2 polypeptide; and iv) an immunoglobulin or non-immunoglobulin scaffold polypeptide. In some cases, a TMAPP of the present disclosure comprises: a) a first polypeptide comprising, in order from N-terminus to C-terminus: i) an immunomodulatory polypeptide; ii) an MHC Class II α1 polypeptide; and iii) an MHC Class II α2 polypeptide; and b) a second polypeptide comprising, in order from N-terminus to C-terminus: i) a peptide antigen (an “epitope”) that is recognized (e.g., is capable of being recognized and bound) by a TCR; ii) an MHC Class II β1 polypeptide; iii) an MHC Class II β2 polypeptide; and iv) an immunoglobulin or non-immunoglobulin scaffold polypeptide. In some cases, a TMAPP of the present disclosure comprises: a) a first polypeptide comprising, in order from N-terminus to C-terminus: i) a peptide antigen (an “epitope”) that is recognized (e.g., is capable of being recognized and bound) by a TCR; ii) an MHC Class II α1 polypeptide; iii) an MHC Class II α2 polypeptide; iv) an immunoglobulin or non-immunoglobulin scaffold polypeptide; and v) a first member of a dimerizer pair (e.g., a first leucine zipper polypeptide); and b) a second polypeptide comprising, in order from N-terminus to C-terminus: i) an immunomodulatory polypeptide; ii) an MHC Class II β1 polypeptide; iii) an MHC Class II β2 polypeptide; and iv) a second member of a dimerizer pair (e.g., a second leucine zipper polypeptide). In some cases, a TMAPP of the present disclosure comprises: a) a first polypeptide comprising, in order from N-terminus to C-terminus: i) an immunomodulatory polypeptide; ii) an MHC Class II α1 polypeptide; iii) an MHC Class II α2 polypeptide; iv) an immunoglobulin or non-immunoglobulin scaffold polypeptide; and v) and v) a first member of a dimerizer pair (e.g., a first leucine zipper polypeptide); and b) a second polypeptide comprising, in order from N-terminus to C-terminus: i) a peptide antigen (an “epitope”) that is recognized (e.g., is capable of being recognized and bound) by a TCR; ii) an MHC Class II β1 polypeptide; iii) an MHC Class II β2 polypeptide; and iv) a second member of a dimerizer pair (e.g., a second leucine zipper polypeptide). In some cases, a TMAPP of the present disclosure comprises: a) a first polypeptide comprising, in order from N-terminus to C-terminus: i) a peptide antigen (an “epitope”) that is recognized (e.g., is capable of being recognized and bound) by a TCR; ii) an MHC Class II α1 polypeptide; iii) an MHC Class II α2 polypeptide; and iv) a first member of a dimerizer pair (e.g., a first leucine zipper polypeptide); and b) a second polypeptide comprising, in order from N-terminus to C-terminus: i) an immunomodulatory polypeptide; ii) an MHC Class II β1 polypeptide; iii) an MHC Class II β2 polypeptide; iv) an immunoglobulin or non-immunoglobulin scaffold polypeptide; and v) a second member of a dimerizer pair (e.g., a second leucine zipper polypeptide). In some cases, a TMAPP of the present disclosure comprises: a) a first polypeptide comprising, in order from N-terminus to C-terminus: i) an immunomodulatory polypeptide; ii) an MHC Class II α1 polypeptide; iii) an MHC Class II α2 polypeptide; and iv) a first member of a dimerizer pair (e.g., a first leucine zipper polypeptide); and b) a second polypeptide comprising, in order from N-terminus to C-terminus: i) a peptide antigen (an “epitope”) that is recognized (e.g., is capable of being recognized and bound) by a TCR; ii) an MHC Class II β1 polypeptide; iii) an MHC Class II β2 polypeptide; iv) an immunoglobulin or non-immunoglobulin scaffold polypeptide; and v) a second member of a dimerizer pair (e.g., a second leucine zipper polypeptide). In any one of the above embodiments, the TMAPP can include 2 copies of the immunomodulatory polypeptide; the 2 copies can be in tandem, or can be separated by a linker. In any one of the above embodiments, the TMAPP can include 3 copies of the immunomodulatory polypeptide; the 3 copies can be in tandem, or can be separated by a linker. In some cases, the TMAPP comprises a linker (an “L1”) between the MHC polypeptide and the Ig Fc polypeptide; where exemplary suitable linkers include (GGGGS)n (SEQ ID NO: 1), where n is 1, 2, 3, 4, 5, 6, 7, or 8. In some cases, the TMAPP comprises a linker (an “L2”) between the immunomodulatory polypeptide and the MHC polypeptide, where exemplary suitable linkers include (GGGGS)n (SEQ ID NO: 1), where n is 1, 2, 3, 4, 5, 6, 7, or 8. In some cases, where the TMAPP comprises two immunomodulatory polypeptides, in some cases, the two immunomodulatory polypeptides are separated by a linker (an “L3); where exemplary suitable linkers include (GGGGS)n (SEQ ID NO: 1), where n is 1, 2, 3, 4, 5, 6, 7, or 8. In some cases, the linker between any two components of the TMAPP comprises the amino acid sequence GGSAAAGG (SEQ ID NO: 2). In any of the above embodiments, in some cases, the Ig Fc is an IgG1 Fc polypeptide. In any of the above embodiments, in some cases, the Ig Fc is an IgG4 Fc polypeptide. In any of the above embodiments, in some cases, the immunomodulatory polypeptide is a PD-L1 polypeptide. In any of the above embodiments, in some cases, the immunomodulatory polypeptide is a TGF-β polypeptide. In any of the above embodiments, in some cases, the immunomodulatory polypeptide is a FasL polypeptide. In some cases, the epitope is an auto-epitope (an epitope of a self antigen).

[0085] In some cases, a TMAPP of the present disclosure comprises: a) a first polypeptide comprising, in order from N-terminus to C-terminus: i) a peptide antigen (an “epitope”) that is recognized (e.g., is capable of being recognized and bound) by a TCR; ii) an MHC Class II β1 polypeptide; iii) an MHC Class II β2 polypeptide; and iv) an immunomodulatory polypeptide; and b) a second polypeptide comprising, in order from N-terminus to C-terminus: i) an MHC Class II α1 polypeptide; and ii) an MHC Class II α2 polypeptide. In some cases, a TMAPP of the present disclosure comprises: a) a first polypeptide comprising, in order from N-terminus to C-terminus: i) a peptide antigen (an “epitope”) that is recognized (e.g., is capable of being recognized and bound) by a TCR; ii) an MHC Class II β1 polypeptide; iii) an MHC Class II β2 polypeptide; and iv) an immunomodulatory polypeptide; and b) a second polypeptide comprising, in order from N-terminus to C-terminus: i) an MHC Class II α1 polypeptide; ii) an MHC Class II α2 polypeptide; and iii) an immunoglobulin or non-immunoglobulin scaffold polypeptide. In some cases, a TMAPP of the present disclosure comprises: a) a first polypeptide comprising, in order from N-terminus to C-terminus: i) a peptide antigen (an “epitope”) that is recognized (e.g., is capable of being recognized and bound) by a TCR; ii) an MHC Class II β1 polypeptide; iii) an MHC Class II β2 polypeptide; and iv) an immunomodulatory polypeptide; and b) a second polypeptide comprising, in order from N-terminus to C-terminus: i) an MHC Class II α1 polypeptide; ii) an MHC Class II α2 polypeptide; and iii) an Ig Fc polypeptide. In some cases, a TMAPP of the present disclosure comprises: a) a first polypeptide comprising, in order from N-terminus to C-terminus: i) a peptide antigen (an “epitope”) that is recognized (e.g., is capable of being recognized and bound) by a TCR; ii) an MHC Class II β1 polypeptide; iii) an MHC Class II β2 polypeptide; iv) an immunomodulatory polypeptide; and v) a first member of a dimerizer pair; and b) a second polypeptide comprising, in order from N-terminus to C-terminus: i) an MHC Class II α1 polypeptide; ii) an MHC Class II α2 polypeptide; and iii) a second member of the dimerizer pair. In some cases, a TMAPP of the present disclosure comprises: a) a first polypeptide comprising, in order from N-terminus to C-terminus: i) a peptide antigen (an “epitope”) that is recognized (e.g., is capable of being recognized and bound) by a TCR; ii) an MHC Class II β1 polypeptide; iii) an MHC Class II β2 polypeptide; iv) an immunomodulatory polypeptide; and v) a first leucine zipper polypeptide; and b) a second polypeptide comprising, in order from N-terminus to C-terminus: i) an MHC Class II α1 polypeptide; ii) an MHC Class II α2 polypeptide; and iii) a second leucine zipper polypeptide. In any one of the above embodiments, the TMAPP can include a single immunomodulatory polypeptide. In any one of the above embodiments, the TMAPP can include 2 copies of the immunomodulatory polypeptide; the 2 copies can be in tandem, or can be separated by a linker. In any one of the above embodiments, the TMAPP can include 3 copies of the immunomodulatory polypeptide; the 3 copies can be in tandem, or can be separated by a linker. In some cases, the TMAPP comprises a linker (an “L1”) between the MHC polypeptide and the Ig Fc polypeptide; where exemplary suitable linkers include (GGGGS)n (SEQ ID NO: 1), where n is 1, 2, 3, 4, 5, 6, 7, or 8. In some cases, the TMAPP comprises a linker (an “L2”) between the immunomodulatory polypeptide and the MHC polypeptide, where exemplary suitable linkers include (GGGGS)n (SEQ ID NO: 1), where n is 1, 2, 3, 4, 5, 6, 7, or 8. In some cases, where the TMAPP comprises two immunomodulatory polypeptides, in some cases, the two immunomodulatory polypeptides are separated by a linker (an “L3); where exemplary suitable linkers include (GGGGS)n (SEQ ID NO: 1), where n is 1, 2, 3, 4, 5, 6, 7, or 8. In some cases, the linker between any two components of the TMAPP comprises the amino acid sequence GGSAAAGG (SEQ ID NO: 2). In any of the above embodiments, in some cases, the Ig Fc is an IgG1 Fc polypeptide. In any of the above embodiments, in some cases, the Ig Fc is an IgG4 Fc polypeptide. In any of the above embodiments, in some cases, the immunomodulatory polypeptide is a PD-L1 polypeptide. In any of the above embodiments, in some cases, the immunomodulatory polypeptide is a TGF-β polypeptide. In any of the above embodiments, in some cases, the immunomodulatory polypeptide is a FasL polypeptide. In some cases, the epitope is an auto-epitope (an epitope of a self antigen).

[0086] In some cases, a TMAPP of the present disclosure comprises: a) a first polypeptide comprising, in order from N-terminus to C-terminus: i) a peptide antigen (an “epitope”) that is recognized (e.g., is capable of being recognized and bound) by a TCR; ii) an MHC Class II β1 polypeptide; and iii) an MHC Class II β2 polypeptide; and b) a second polypeptide comprising, in order from N-terminus to C-terminus: i) an immunomodulatory polypeptide; ii) an MHC Class II α1 polypeptide; and iii) an MHC Class II α2 polypeptide. In some cases, a TMAPP of the present disclosure comprises: a) a first polypeptide comprising, in order from N-terminus to C-terminus: i) a peptide antigen (an “epitope”) that is recognized (e.g., is capable of being recognized and bound) by a TCR; ii) an MHC Class II β1 polypeptide; and iii) an MHC Class II β2 polypeptide; and b) a second polypeptide comprising, in order from N-terminus to C-terminus: i) an immunomodulatory polypeptide; ii) an MHC Class II α1 polypeptide; iii) an MHC Class II α2 polypeptide; and iv) an immunoglobulin or non-immunoglobulin scaffold polypeptide. In some cases, a TMAPP of the present disclosure comprises: a) a first polypeptide comprising, in order from N-terminus to C-terminus: i) a peptide antigen (an “epitope”) that is recognized (e.g., is capable of being recognized and bound) by a TCR; ii) an MHC Class II β1 polypeptide; and iii) an MHC Class II β2 polypeptide; and b) a second polypeptide comprising, in order from N-terminus to C-terminus: i) an immunomodulatory polypeptide; ii) an MHC Class II α1 polypeptide; iii) an MHC Class II α2 polypeptide; and iv) an Ig Fc polypeptide. In some cases, a TMAPP of the present disclosure comprises: a) a first polypeptide comprising, in order from N-terminus to C-terminus: i) a peptide antigen (an “epitope”) that is recognized (e.g., is capable of being recognized and bound) by a TCR; ii) an MHC Class II β1 polypeptide; iii) an MHC Class II β2 polypeptide; and iv) a first member of a dimerizer pair; and b) a second polypeptide comprising, in order from N-terminus to C-terminus: i) an immunomodulatory polypeptide; ii) an MHC Class II α1 polypeptide; iii) an MHC Class II α2 polypeptide; and iv) a second member of the dimerizer pair. In some cases, a TMAPP of the present disclosure comprises: a) a first polypeptide comprising, in order from N-terminus to C-terminus: i) a peptide antigen (an “epitope”) that is recognized (e.g., is capable of being recognized and bound) by a TCR; ii) an MHC Class II β1 polypeptide; iii) an MHC Class II β2 polypeptide; and iv) a first leucine zipper polypeptide; and b) a second polypeptide comprising, in order from N-terminus to C-terminus: i) an immunomodulatory polypeptide; ii) an MHC Class II α1 polypeptide; iii) an MHC Class II α2 polypeptide; and iv) a second leucine zipper polypeptide. In any one of the above embodiments, the TMAPP can include a single immunomodulatory polypeptide. In any one of the above embodiments, the TMAPP can include 2 copies of the immunomodulatory polypeptide; the 2 copies can be in tandem, or can be separated by a linker. In any one of the above embodiments, the TMAPP can include 3 copies of the immunomodulatory polypeptide; the 3 copies can be in tandem, or can be separated by a linker. In some cases, the TMAPP comprises a linker (an “L1”) between the MHC polypeptide and the Ig Fc polypeptide; where exemplary suitable linkers include (GGGGS)n (SEQ ID NO: 1), where n is 1, 2, 3, 4, 5, 6, 7, or 8. In some cases, the TMAPP comprises a linker (an “L2”) between the immunomodulatory polypeptide and the MHC polypeptide, where exemplary suitable linkers include (GGGGS)n (SEQ ID NO: 1), where n is 1, 2, 3, 4, 5, 6, 7, or 8. In some cases, where the TMAPP comprises two immunomodulatory polypeptides, in some cases, the two immunomodulatory polypeptides are separated by a linker (an “L3); where exemplary suitable linkers include (GGGGS)n (SEQ ID NO: 1), where n is 1, 2, 3, 4, 5, 6, 7, or 8. In some cases, the linker between any two components of the TMAPP comprises the amino acid sequence GGSAAAGG (SEQ ID NO: 2). In any of the above embodiments, in some cases, the Ig Fc is an IgG1 Fc polypeptide. In any of the above embodiments, in some cases, the Ig Fc is an IgG4 Fc polypeptide. In any of the above embodiments, in some cases, the immunomodulatory polypeptide is a PD-L1 polypeptide. In any of the above embodiments, in some cases, the immunomodulatory polypeptide is a TGF-β polypeptide. In any of the above embodiments, in some cases, the immunomodulatory polypeptide is a FasL polypeptide. In some cases, the epitope is an auto-epitope (an epitope of a self antigen).

[0087] In some cases, a TMAPP of the present disclosure comprises: a) a first polypeptide comprising, in order from N-terminus to C-terminus: i) a peptide antigen (an “epitope”) that is recognized (e.g., is capable of being recognized and bound) by a TCR; ii) an MHC Class II β1 polypeptide; iii) an MHC Class II α1 polypeptide; and iv) an MHC Class II α2 polypeptide; and b) a second polypeptide comprising, in order from N-terminus to C-terminus: i) an immunomodulatory polypeptide; and ii) an MHC Class II β2 polypeptide. In some cases, a TMAPP of the present disclosure comprises: a) a first polypeptide comprising, in order from N-terminus to C-terminus: i) a peptide antigen (an “epitope”) that is recognized (e.g., is capable of being recognized and bound) by a TCR; ii) an MHC Class II β1 polypeptide; iii) an MHC Class II α1 polypeptide; iv) an MHC Class II α2 polypeptide; and v) an immunoglobulin or non-immunoglobulin scaffold polypeptide; and b) a second polypeptide comprising, in order from N-terminus to C-terminus: i) an immunomodulatory polypeptide; and ii) an MHC Class II β2 polypeptide. In some cases, a TMAPP of the present disclosure comprises: a) a first polypeptide comprising, in order from N-terminus to C-terminus: i) a peptide antigen (an “epitope”) that is recognized (e.g., is capable of being recognized and bound) by a TCR; ii) an MHC Class II β1 polypeptide; iii) an MHC Class II α1 polypeptide; iv) an MHC Class II α2 polypeptide; and v) an Ig Fc polypeptide; and b) a second polypeptide comprising, in order from N-terminus to C-terminus: i) an immunomodulatory polypeptide; and ii) an MHC Class II β2 polypeptide. In some cases, a TMAPP of the present disclosure comprises: a) a first polypeptide comprising, in order from N-terminus to C-terminus: i) a peptide antigen (an “epitope”) that is recognized (e.g., is capable of being recognized and bound) by a TCR; ii) an MHC Class II β1 polypeptide; iii) an MHC Class II α1 polypeptide; iv) an MHC Class II α2 polypeptide; and v) a first member of a dimerizer pair; and b) a second polypeptide comprising, in order from N-terminus to C-terminus: i) an immunomodulatory polypeptide; ii) an MHC Class II β2 polypeptide; and iii) a second member of the dimerizer pair. In some cases, a TMAPP of the present disclosure comprises: a) a first polypeptide comprising, in order from N-terminus to C-terminus: i) a peptide antigen (an “epitope”) that is recognized (e.g., is capable of being recognized and bound) by a TCR; ii) an MHC Class II β1 polypeptide; iii) an MHC Class II α1 polypeptide; iv) an MHC Class II α2 polypeptide; and v) a first leucine zipper polypeptide; and b) a second polypeptide comprising, in order from N-terminus to C-terminus: i) an immunomodulatory polypeptide; ii) an MHC Class II β2 polypeptide; and iii) a second leucine zipper polypeptide. In any one of the above embodiments, the TMAPP can include a single immunomodulatory polypeptide. In any one of the above embodiments, the TMAPP can include 2 copies of the immunomodulatory polypeptide; the 2 copies can be in tandem, or can be separated by a linker. In any one of the above embodiments, the TMAPP can include 3 copies of the immunomodulatory polypeptide; the 3 copies can be in tandem, or can be separated by a linker. In some cases, the TMAPP comprises a linker (an “L1”) between the MHC polypeptide and the Ig Fc polypeptide; where exemplary suitable linkers include (GGGGS)n (SEQ ID NO: 1), where n is 1, 2, 3, 4, 5, 6, 7, or 8. In some cases, the TMAPP comprises a linker (an “L2”) between the immunomodulatory polypeptide and the MHC polypeptide, where exemplary suitable linkers include (GGGGS)n (SEQ ID NO: 1), where n is 1, 2, 3, 4, 5, 6, 7, or 8. In some cases, where the TMAPP comprises two immunomodulatory polypeptides, in some cases, the two immunomodulatory polypeptides are separated by a linker (an “L3); where exemplary suitable linkers include (GGGGS)n (SEQ ID NO: 1), where n is 1, 2, 3, 4, 5, 6, 7, or 8. In some cases, the linker between any two components of the TMAPP comprises the amino acid sequence GGSAAAGG (SEQ ID NO: 2). In any of the above embodiments, in some cases, the Ig Fc is an IgG1 Fc polypeptide. In any of the above embodiments, in some cases, the Ig Fc is an IgG4 Fc polypeptide. In any of the above embodiments, in some cases, the immunomodulatory polypeptide is a PD-L1 polypeptide. In any of the above embodiments, in some cases, the immunomodulatory polypeptide is a TGF-β polypeptide. In any of the above embodiments, in some cases, the immunomodulatory polypeptide is a FasL polypeptide. In some cases, the epitope is an auto-epitope (an epitope of a self antigen).

### Single-Chain T-Cell Modulatory Antigen-Presenting Polypeptides

[0088] As noted above, in some cases, a TMAPP of the present disclosure is a single-chain (a single polypeptide chain) TMAPP. A single-chain TMAPP of the present disclosure comprises: i) a peptide antigen (an “epitope”) that is recognized (e.g., is capable of being recognized and bound) by a TCR; ii) an MHC Class II β1 polypeptide; iii) an MHC Class II β2 polypeptide; iv) an MHC Class II α1 polypeptide; v) an MHC Class II α2 polypeptide; and vi) at least one immunomodulatory polypeptide. A single-chain TMAPP of the present disclosure can also include an Ig Fc polypeptide. A single-chain TMAPP of the present disclosure can comprise two or more immunomodulatory polypeptides, where the two or more immunomodulatory polypeptides can have the same amino acid sequence or different amino acid sequences. The arrangement of the components, including the placement of the immunomodulatory polypeptide, of a single-chain TMAPP of the present disclosure can vary. Non-limiting examples are depicted in FIG. 4A-4C. For example, in some cases, a single-chain TMAPP of the present disclosure can comprise, in order from N-terminus to C-terminus: i) a peptide antigen (an “epitope”) that is recognized (e.g., is capable of being recognized and bound) by a TCR; ii) an MHC Class II α1 polypeptide; iii) an MHC Class II α2 polypeptide; iv) an MHC Class II β1 polypeptide; v) an MHC Class II β2 polypeptide; and vi) an Ig Fc polypeptide, where the immunomodulatory polypeptide of the single-chain TMAPP is located at one or more of: i) at the N-terminus (N-terminal to the peptide antigen); ii) between the peptide antigen (“epitope”) and the MHC Class II α1 polypeptide; iii) between the MHC Class II α2 polypeptide and the MHC Class II β1 polypeptide; iv) between the MHC Class II β2 polypeptide and the Ig Fc polypeptide; and v) C-terminal to the Ig Fc polypeptide. Such arrangements are depicted schematically in FIG. 4A. As another example, in some cases, a single-chain TMAPP of the present disclosure can comprise, in order from N-terminus to C-terminus: i) a peptide antigen (an “epitope”) that is recognized (e.g., is capable of being recognized and bound) by a TCR; ii) an MHC Class II β1 polypeptide; iii) an MHC Class II β2 polypeptide; iv) an MHC Class II α1 polypeptide; v) an MHC Class II α2 polypeptide; and vi) an Ig Fc polypeptide, where the immunomodulatory polypeptide of the single-chain TMAPP is located at one or more of: i) at the N-terminus (N-terminal to the peptide antigen); ii) between the peptide antigen (“epitope”) and the MHC Class II β1 polypeptide; iii) between the MHC Class II β2 polypeptide and the MHC Class II α1 polypeptide; iv) between the MHC Class II α2 polypeptide and the Ig Fc polypeptide; and v) C-terminal to the Ig Fc polypeptide. Such arrangements are depicted schematically in FIG. 4B. As another example, in some cases, a single-chain TMAPP of the present disclosure can comprise, in order from N-terminus to C-terminus: i) a peptide antigen (an “epitope”) that is recognized (e.g., is capable of being recognized and bound) by a TCR; ii) an MHC Class II β1 polypeptide; iii) an MHC Class II α1 polypeptide; iv) an MHC Class II α2 polypeptide; v) an MHC Class II β2 polypeptide; and vi) an Ig Fc polypeptide, where the immunomodulatory polypeptide of the single-chain TMAPP is located at one or more of: i) at the N-terminus (N-terminal to the peptide antigen); ii) between the peptide antigen (“epitope”) and the MHC Class II β1 polypeptide; iii) between the MHC Class II α1 polypeptide and the MHC Class II α2 polypeptide; iv) between the MHC Class II β2 polypeptide and the Ig Fc polypeptide; and v) v) C-terminal to the Ig Fc polypeptide. Such arrangements are depicted schematically in FIG. 4C. In any one of the above embodiments, the TMAPP can include a single immunomodulatory polypeptide. In any one of the above embodiments, the TMAPP can include 2 copies of the immunomodulatory polypeptide; the 2 copies can be in tandem, or can be separated by a linker. In any one of the above embodiments, the TMAPP can include 3 copies of the immunomodulatory polypeptide; the 3 copies can be in tandem, or can be separated by a linker. In some cases, the TMAPP comprises a linker (an “L1”) between the MHC polypeptide and the Ig Fc polypeptide; where exemplary suitable linkers include (GGGGS)n (SEQ ID NO: 1), where n is 1, 2, 3, 4, 5, 6, 7, or 8. In some cases, the TMAPP comprises a linker (an “L2”) between the immunomodulatory polypeptide and the MHC polypeptide, where exemplary suitable linkers include (GGGGS)n (SEQ ID NO: 1), where n is 1, 2, 3, 4, 5, 6, 7, or 8. In some cases, where the TMAPP comprises two immunomodulatory polypeptides, in some cases, the two immunomodulatory polypeptides are separated by a linker (an “L3); where exemplary suitable linkers include (GGGGS)n (SEQ ID NO: 1), where n is 1, 2, 3, 4, 5, 6, 7, or 8. In some cases, the linker between any two components of the TMAPP comprises the amino acid sequence GGSAAAGG (SEQ ID NO: 2). In any of the above embodiments, in some cases, the Ig Fc is an IgG1 Fc polypeptide. In any of the above embodiments, in some cases, the Ig Fc is an IgG4 Fc polypeptide. In any of the above embodiments, in some cases, the immunomodulatory polypeptide is a PD-L1 polypeptide. In any of the above embodiments, in some cases, the immunomodulatory polypeptide is a TGF-β polypeptide. In any of the above embodiments, in some cases, the immunomodulatory polypeptide is a FasL polypeptide. In some cases, the epitope is an auto-epitope (an epitope of a self antigen

### Class II MHC Polypeptides

[0089] As noted above, a TMAPP of the present disclosure comprises Class II MHC polypeptides.

[0090] Naturally occurring Class II MHC polypeptides comprise an α chain and a β chain. “Class II MHC polypeptides” include human leukocyte antigen (HLA) α- and β-chains. MHC Class II polypeptides include MHC Class II DP α and β polypeptides, DM α and β polypeptides, DOA α and β polypeptides, DOB α and β polypeptides, DQ α and β polypeptides, and DR α and β polypeptides. As used herein, a “Class II MHC polypeptide” can comprise a class II MHC α chain polypeptide, a class II MHC β chain polypeptide, or only a portion of a class II MHC α or β chain polypeptide. For example, a “Class II MHC polypeptide” can be a polypeptide that includes: i) only the α1 domain of a class II MHC α chain polypeptide; ii) only the α2 domain of a class II MHC α chain; iii) only the α1 domain and an α2 domain of a class II MHC α chain; iv) only the β1 domain of a class II MHC β chain; v) only the β2 domain of a class II MHC β chain; vi) only the β1 domain and the β2 domain of a class II MHC β chain; vii) the α1 domain of a class II MHC α chain, the β1 domain of a class II MHC β chain, and the β2 domain of a class II MHC; and the like.

[0091] Class II MHC polypeptides include allelic forms. The HLA locus is highly polymorphic in nature. As disclosed in the Nomenclature for Factors of the HLA System 2000 (Hum. Immunol.; 62(4):419-68, 2001) there are 221 HLA-DRB 1 alleles, 19 DRB3 alleles, 89 DRB4 alleles, 14 DRB5 alleles, 19 DQA1 alleles and 39 DQB1 alleles, with new alleles being discovered continuously. A 2007 update by the WHO nomenclature Committee for Factors of the HLA System (www.anthonynolan.com/HIG/) showed there are 3 DRA alleles, 494 DRB 1 alleles, 1 DRB2 alleles, 44 DRB3 alleles, 13 DRB4 alleles, 18 DRB5 alleles, 3 DRB6 alleles, 2 DRB7 alleles, 10 DRB8 alleles, 1 DRB9 alleles, 34 DQA1 alleles, 83 DQB1 alleles, 23 DPA1, 126 DPB1 alleles, 4 DMA alleles, 7 DMB alleles, 12 DOA alleles and 9 DOB alleles. As used herein, the term “Class II MHC polypeptide” includes allelic forms of any known Class II MHC polypeptide.

[0092] In some cases, a TMAPP of the present disclosure comprises a Class II MHC α chain, without the leader, transmembrane, and intracellular portions (e.g., cytoplasmic tails) that may be present in a naturally-occurring Class II MHC α chain. Thus, in some cases, a TMAPP of the present disclosure comprises only the α1 and α2 portions of a Class II MHC α chain; and does not include the leader, transmembrane, and intracellular portions (e.g., cytoplasmic tails) that may be present in a naturally-occurring Class II MHC α chain.

[0093] In some cases, a TMAPP of the present disclosure comprises a Class II MHC β chain, without the leader, transmembrane, and intracellular portions (e.g., cytoplasmic tails) that may be present in a naturally-occurring Class II MHC β chain. Thus, in some cases, a TMAPP of the present disclosure comprises only the β1 and β2 portions of a Class II MHC β chain; and does not include the leader, transmembrane, and intracellular portions (e.g., cytoplasmic tails) that may be present in a naturally-occurring Class II MHC β chain.

### MHC Class II Alpha Chains

[0094] MHC Class II alpha chains comprise an α1 domain and an α2 domain. In some cases, the α1 domain and the α2 domain present in an antigen-presenting cell are from the same MHC Class II α chain polypeptide. In some cases, the α1 domain and the α2 domain present in an antigen-presenting cell are from two different MHC Class II α chain polypeptides.

[0095] MHC Class II alpha chains suitable for inclusion in a TMAPP (e.g., a multimeric TMAPP; a single-chain TMAPP) of the present disclosure lack a signal peptide. An MHC Class II alpha chain suitable for inclusion in a multimeric polypeptide of the present disclosure can have a length of from about 60 amino acids to about 190 amino acids; for example, an MHC Class II alpha chain suitable for inclusion in a TMAPP of the present disclosure can have a length of from about 60 amino acids to about 80 amino acids, from about 80 amino acids to about 100 amino acids, from about 100 amino acids to about 120 amino acids, from about 120 amino acids to about 140 amino acids, from about 140 amino acids to about 160 amino acids, from about 160 amino acids to about 180 amino acids, or from about 180 amino acids to about 200 amino acids. An MHC Class II α1 domain suitable for inclusion in a TMAPP of the present disclosure can have a length of from about 30 amino acids to about 95 amino acids; for example, an MHC Class II α1 domain suitable for inclusion in a TMAPP of the present disclosure can have a length of from about 30 amino acids to about 40 amino acids, from about 40 amino acids to about 50 amino acids, from about 50 amino acids to about 60 amino acids, from about 60 amino acids to about 70 amino acids, from about 70 amino acids to about 80 amino acids, from about 80 amino acids to about 90 amino acids, or from about 90 amino acids to about 95 amino acids. An MHC Class II α2 domain suitable for inclusion in a TMAPP of the present disclosure can have a length of from about 30 amino acids to about 95 amino acids; for example, an MHC Class II α2 domain suitable for inclusion in a TMAPP of the present disclosure can have a length of from about 30 amino acids to about 40 amino acids, from about 40 amino acids to about 50 amino acids, from about 50 amino acids to about 60 amino acids, from about 60 amino acids to about 70 amino acids, from about 70 amino acids to about 80 amino acids, from about 80 amino acids to about 90 amino acids, or from about 90 amino acids to about 95 amino acids.

### DRA

[0096] In some cases, a suitable MHC Class II α chain polypeptide is a DRA polypeptide. A DRA polypeptide can have at least 60%, at least 70%, at least 80%, at least 90%, at least 95%, at least 98%, at least 99%, or 100%, amino acid sequence identity with amino acids 26-203 of the DRA amino acid sequence depicted in FIG. 6. In some cases, the DRA polypeptide has a length of about 178 amino acids (e.g., 175, 176, 177, 178, 179, or 180 amino acids).

[0097] A “DRA polypeptide” includes allelic variants, e.g., naturally occurring allelic variants. Thus, in some cases, a suitable DRA polypeptide comprises the following amino acid sequence: IKEEH VIIQAEFYLN PDQSGEFMFD FDGDEIFHVD MAKKETVWRL EEFGRFASFE AQGALANIAV DKANLEIMTK RSNYTPITNV PPEVTVLTNSPVELREPNVL ICFIDKFTPP VVNVTWLRNG KPVTTGVSET VFLPREDHLF RKFHYLPFLPSTEDVYDCRV EHWGLDEPLL KHW (SEQ ID NO: 5, amino acids 26-203 of DRA*01:02:01, see FIG. 6), or an allelic variant thereof. In some cases, the allelic variant is the DRA*01:01:01:01 allelic variant that differs from DRA*01:02:01 by having a valine in place of the leucine at position 242 of the sequence in FIG. 6.

[0098] A suitable DRA α1 domain comprises an amino acid sequence having at least 60%, at least 70%, at least 80%, at least 90%, at least 95%, at least 98%, at least 99%, or 100%, amino acid sequence identity to the following amino acid sequence: VIIQAEFYLN PDQSGEFMFD FDGDEIFHVD MAKKETVWRL EEFGRFASFE AQGALANIAV DKANLEIMTK RSNYTPITN (SEQ ID NO: 6); and can have a length of about 84 amino acids (e.g., 80, 81, 82, 83, 84, 85, or 86 amino acids). A suitable DRA α1 domain can comprise the following amino acid sequence: VIIQAEFYLN PDQSGEFMFD FDGDEIFHVD MAKKETVWRL EEFGRFASFE AQGALANIAV DKANLEIMTK RSNYTPITN (SEQ ID NO: 6), or a naturally-occurring allelic variant.

[0099] A suitable DRA α2 domain comprises an amino acid sequence having at least 60%, at least 70%, at least 80%, at least 90%, at least 95%, at least 98%, at least 99%, or 100%, amino acid sequence identity to the following amino acid sequence: V PPEVTVLTNSPVELREPNVL ICFIDKFTPP VVNVTWLRNG KPVTTGVSET VFLPREDHLF RKFHYLPFLPSTEDVYDCRV EHWGLDEPLL KHW (SEQ ID NO: 7); and can have a length of about 94 amino acids (e.g., 90, 91, 92, 93, 94, 95, 96, 97, or 98 amino acids).

### DMA

[0100] In some cases, a suitable MHC Class II α chain polypeptide is a DMA polypeptide. A DMA polypeptide can have at least 60%, at least 70%, at least 80%, at least 90%, at least 95%, at least 98%, at least 99%, or 100%, amino acid sequence identity with amino acids 27-217 of the DMA amino acid sequence depicted in FIG. 11. In some cases, the DMA polypeptide has a length of about 191 amino acids (e.g., 188, 189, 190, 191, 192, or 193 amino acids).

[0101] A “DMAA polypeptide” includes allelic variants, e.g., naturally occurring allelic variants. Thus, in some cases, a suitable DMAA polypeptide comprises the following amino acid sequence: VPEA PTPMWPDDLQ NHTFLHTVYC QDGSPSVGLS EAYDEDQLFF FDFSQNTRVP RLPEFADWAQ EQGDAPAILF DKEFCEWMIQ QIGPKLDGKI PVSRGFPIAE VFTLKPLEFG KPNTLVCFVS NLFPPMLTVN WQHHSVPVEG FGPTFVSAVD GLSFQAFSYL NFTPEPSDIF SCIVTHEIDR YTAIAYW (SEQ ID NO: 8 amino acids 27-217 of DMA*01:01:01, see FIG. 11), or an allelic variant thereof.

[0102] A suitable DMA α1 domain comprises an amino acid sequence having at least 60%, at least 70%, at least 80%, at least 90%, at least 95%, at least 98%, at least 99%, or 100%, amino acid sequence identity to the following amino acid sequence: VPEA PTPMWPDDLQ NHTFLHTVYC QDGSPSVGLS EAYDEDQLFF FDFSQNTRVP RLPEFADWAQ EQGDAPAILF DKEFCEWMIQ QIGPKLDGKI PVSR (SEQ ID NO: 9); and can have a length of about 98 amino acids (e.g., 94, 95, 96, 97, 98, 99, 100, or 101 amino acids). A suitable DMA α1 domain can comprise the following amino acid sequence: VPEA PTPMWPDDLQ NHTFLHTVYC QDGSPSVGLS EAYDEDQLFF FDFSQNTRVP RLPEFADWAQ EQGDAPAILF DKEFCEWMIQ QIGPKLDGKI PVSR (SEQ ID NO: 9), or a naturally-occurring allelic variant thereof.

[0103] A suitable DMA α2 domain comprises an amino acid sequence having at least 60%, at least 70%, at least 80%, at least 90%, at least 95%, at least 98%, at least 99%, or 100%, amino acid sequence identity to the following amino acid sequence: GFPIAE VFTLKPLEFG KPNTLVCFVS NLFPPMLTVN WQHHSVPVEG FGPTFVSAVD GLSFQAFSYL NFTPEPSDIF SCIVTHEIDR YTAIAYW (SEQ ID NO: 10); and can have a length of about 93 amino acids (e.g., 90, 91, 92, 93, 94, 95, 96, or 97 amino acids). A suitable DMA α2 domain can comprise the following amino acid sequence: GFPIAE VFTLKPLEFG KPNTLVCFVS NLFPPMLTVN WQHHSVPVEG FGPTFVSAVD GLSFQAFSYL NFTPEPSDIF SCIVTHEIDR YTAIAYW (SEQ ID NO: 10), or a naturally-occurring allelic variant thereof.

### DOA

[0104] In some cases, a suitable MHC Class II α chain polypeptide is a DOA polypeptide. A DOA polypeptide can have at least 60%, at least 70%, at least 80%, at least 90%, at least 95%, at least 98%, at least 99%, or 100%, amino acid sequence identity with amino acids 26-204 of the DOA amino acid sequence depicted in FIG. 13. In some cases, the DOA polypeptide has a length of about 179 amino acids (e.g., 175, 176, 177, 178, 179, 180, 181, or 182 amino acids).

[0105] A “DOA polypeptide” includes allelic variants, e.g., naturally occurring allelic variants. Thus, in some cases, a suitable DOA polypeptide comprises the following amino acid sequence: TKADH MGSYGPAFYQ SYGASGQFTH EFDEEQLFSV DLKKSEAVWR LPEFGDFARF DPQGGLAGIA AIKAHLDILV ERSNRSRAIN VPPRVTVLPK SRVELGQPNI LICIVDNIFP PVINITWLRN GQTVTEGVAQ TSFYSQPDHL FRKFHYLPFV PSAEDVYDCQ VEHWGLDAPL LRHW (SEQ ID NO: 11; amino acids 26-204 of DOA*01:01:01:01, see FIG. 13), or an allelic variant thereof. In some cases, the allelic variant may be the DOA*01:02 by having an arginine in place of the cysteine (R80C) at position 80 or the DOA*01:03 variant having a valine in place of the leucine at position 74 (L74V) relative to DOA*01:01:01:01.

[0106] A suitable DOA α1 domain comprises an amino acid sequence having at least 60%, at least 70%, at least 80%, at least 90%, at least 95%, at least 98%, at least 99%, or 100%, amino acid sequence identity to the following amino acid sequence: TKADH MGSYGPAFYQ SYGASGQFTH EFDEEQLFSV DLKKSEAVWR LPEFGDFARF DPQGGLAGIA AIKAHLDILV ERSNRSRAIN (SEQ ID NO: 12); and can have a length of about 85 amino acids (e.g., 83, 84, 85, 86, 87, or 88 amino acids). Suitable α1 domain sequence may incorporate the L74V and/or R80C substitutions found in DOA*01:02 and DOA*01:03 (the amino acids corresponding to L74 and R 80 are shown italicized and bolded). A suitable DOA α1 domain can comprise the following amino acid sequence: TKADH MGSYGPAFYQ SYGASGQFTH EFDEEQLFSV DLKKSEAVWR LPEFGDFARF DPQGGLAGIA AIKAHLDILV ERSNRSRAIN (SEQ ID NO: 12), or a naturally-occurring allelic variant.

[0107] A suitable DOA α2 domain comprises an amino acid sequence having at least 60%, at least 70%, at least 80%, at least 90%, at least 95%, at least 98%, at least 99%, or 100%, amino acid sequence identity to the following amino acid sequence: VPPRVTVLPK SRVELGQPNI LICIVDNIFP PVINITWLRN GQTVTEGVAQ TSFYSQPDHL FRKFHYLPFV PSAEDVYDCQ VEHWGLDAPL LRHW (SEQ ID NO: 13); and can have a length of about 94 amino acids (e.g., 91, 92, 93, 94, 95, 96, or 97 amino acids). A suitable DOA α2 domain can comprise the following amino acid sequence: VPPRVTVLPK SRVELGQPNI LICIVDNIFP PVINITWLRN GQTVTEGVAQ TSFYSQPDHL FRKFHYLPFV PSAEDVYDCQ VEHWGLDAPL LRHW (SEQ ID NO: 13), or a naturally-occurring allelic variant thereof.

### DPA1

[0108] In some cases, a suitable MHC Class II α chain polypeptide is a DPA1 polypeptide. A DPA1 polypeptide can have at least 60%, at least 70%, at least 80%, at least 90%, at least 95%, at least 98%, at least 99%, or 100%, amino acid sequence identity with amino acids 29-209 of the DPA1 amino acid sequence depicted in FIG. 15. In some cases, the DPA1 polypeptide has a length of about 181 amino acids (e.g., 178, 179, 180, 181, 182, 183, or 184 amino acids).

[0109] A “DPA1 polypeptide” includes allelic variants, e.g., naturally occurring allelic variants. Thus, in some cases, a suitable DPA1 polypeptide comprises the following amino acid sequence: AG AIKADHVSTY AAFVQTHRPT GEFMFEFDED EMFYVDLDKK ETVWHLEEFG QAFSFEAQGG LANIAILNNN LNTLIQRSNH TQATNDPPEV TVFPKEPVEL GQPNTLICHI DKFFPPVLNV TWLCNGELVT EGVAESLFLP RTDYSFHKFH YLTFVPSAED FYDCRVEHWG LDQPLLKHW (SEQ ID NO: 14, amino acids 29-209 of DPA1*01:03:01:01, see FIG. 15), or an allelic variant thereof.

[0110] A suitable DPA1 α1 domain may comprise an amino acid sequence having at least 60%, at least 70%, at least 80%, at least 90%, at least 95%, at least 98%, at least 99%, or 100%, amino acid sequence identity to the following amino acid sequence: AIKADHVSTY AAFVQTHRPT GEFMFEFDED EMFYVDLDKK ETVWHLEEFG QAFSFEAQGG LANIAILNNN LNTLIQRSNH TQATN (SEQ ID NO: 15); and can have a length of about 87 amino acids (e.g., 84, 85, 86, 87, 88, or 89 amino acids). A suitable DPA1 α1 domain can comprise the following amino acid sequence: AIKADHVSTY AAFVQTHRPT GEFMFEFDED EMFYVDLDKK ETVWHLEEFG QAFSFEAQGG LANIAILNNN LNTLIQRSNH TQATN (SEQ ID NO: 15), or a naturally-occurring allelic variant.

[0111] A suitable DPA1 α2 domain may comprise an amino acid sequence having at least 60%, at least 70%, at least 80%, at least 90%, at least 95%, at least 98%, at least 99%, or 100%, amino acid sequence identity to the following amino acid sequence: DPPEV TVFPKEPVEL GQPNTLICHI DKFFPPVLNV TWLCNGELVT EGVAESLFLP RTDYSFHKFH YLTFVPSAED FYDCRVEHWG LDQPLLKHW (SEQ ID NO: 16); and can have a length of about 97 amino acids (e.g., 91, 92, 93, 94, 95, 96, or 97 amino acids). A suitable DPA1 α2 domain can comprise the following amino acid sequence: DPPEV TVFPKEPVEL GQPNTLICHI DKFFPPVLNV TWLCNGELVT EGVAESLFLP RTDYSFHKFH YLTFVPSAED FYDCRVEHWG LDQPLLKHW (SEQ ID NO: 16), or a naturally-occurring allelic variant thereof.

[0112] Other DPA1 polypeptides comprise the sequence: MRPEDRMFHIRAVILRALSLAFLLSLRGAGAIKADHVSTYAAFVQTHRPTGEFMFEFDE DEQFYVDLDKKETVWHLEEFGRAFSFEAQGGLANIAILNNNLNTLIQRSNHTQAANDPP EVTVFPKEPVELGQPNTLICHIDRFFPPVLNVTWLCNGEPVTEGVAESLFLPRTDYSFHKF HYLTFVPSAEDVYDCRVEHWGLDQPLLKHWEAQEPIQMPETTETVLCALGLVLGLVGII VGTVLIIKSLRSGHDPRAQGPL (SEQ ID NO: 17; amino acids 29-209 of DPA1*02:01:01:01, see FIG. 15), or variant thereof having at least 60%, at least 70%, at least 80%, at least 90%, at least 95%, at least 98%, at least 99%, or 100%, amino acid sequence identity.

[0113] A suitable DPA1 α1 domain may comprise an amino acid sequence having at least 60%, at least 70%, at least 80%, at least 90%, at least 95%, at least 98%, at least 99%, or 100%, amino acid sequence identity to the amino acids 29-115 of DPA1*02:01:01:01, SEQ ID NO: 17; and can have a length of about 87 amino acids (e.g., 84, 85, 86, 87, 88, or 89 amino acids. A suitable DPA1 α2 domain may comprise an amino acid sequence having at least 60%, at least 70%, at least 80%, at least 90%, at least 95%, at least 98%, at least 99%, or 100%, amino acid sequence identity to amino acids 116 to 209 of DPA1*02:01:01:01, SEQ ID NO: 17; and can have a length of about 97 amino acids (e.g., 91, 92, 93, 94, 95, 96, or 97 amino acids).

### DQA1

[0114] In some cases, a suitable MHC Class II α chain polypeptide is a DQA1 polypeptide. A DQA1 polypeptide can have at least 60%, at least 70%, at least 80%, at least 90%, at least 95%, at least 98%, at least 99%, or 100%, amino acid sequence identity with amino acids 24-204 of any of the DQA1 amino acid sequences depicted in FIG. 17. In some cases, the DQA1 polypeptide has a length of about 181 amino acids (e.g., 177, 178, 179, 180, 181, 182, or 183 amino acids). In an embodiment, a DQA1 α chain polypeptide can have at least 60%, at least 70%, at least 80%, at least 90%, at least 95%, at least 98%, at least 99%, or 100%, amino acid sequence identity with amino acids 30-227 of the DQA1*01:01 α chain amino acid in FIG. 17, ImMunoGeneTics (“IMGT”)/HLA Acc No:HLA00601. In an embodiment, a DQA1 α chain polypeptide can have at least 60%, at least 70%, at least 80%, at least 90%, at least 95%, at least 98%, at least 99%, or 100%, amino acid sequence identity with amino acids 30-227 of the DQA1*01:02 α chain amino acid in FIG. 17, IMGT/HLA Acc No:HLA00603, GenBank NP_002113. In an embodiment, a DQA1 α chain polypeptide can have at least 60%, at least 70%, at least 80%, at least 90%, at least 95%, at least 98%, at least 99%, or 100%, amino acid sequence identity with amino acids 30-227 of the DQA1*02:01 α chain amino acid in FIG. 17, IMGT/HLA Acc No:HLA00607. In an embodiment, a DQA1 α chain polypeptide can have at least 60%, at least 70%, at least 80%, at least 90%, at least 95%, at least 98%, at least 99%, or 100%, amino acid sequence identity with amino acids 30-227 of the DQA1*03:01: α chain amino acid in FIG. 17, IMGT/HLA Acc No:HLA00609. In an embodiment, a DQA1 α chain polypeptide can have at least 60%, at least 70%, at least 80%, at least 90%, at least 95%, at least 98%, at least 99%, or 100%, amino acid sequence identity with amino acids 30-227 of the DQA1*04:01 α chain amino acid in FIG. 17, IMGT/HLA Acc No:HLA00612. In an embodiment, a DQA1 α chain polypeptide can have at least 60%, at least 70%, at least 80%, at least 90%, at least 95%, at least 98%, at least 99%, or 100%, amino acid sequence identity with amino acids 30-227 of the DQA1*05:01 α chain amino acid in FIG. 17, IMGT/HLA Acc No:HLA00613. In an embodiment, a DQA1 α chain polypeptide can have at least 60%, at least 70%, at least 80%, at least 90%, at least 95%, at least 98%, at least 99%, or 100%, amino acid sequence identity with amino acids 30-227 of the DQA1*06:01 α chain amino acid in FIG. 17, IMGT/HLA Acc No:HLA00620.

[0115] A “DQA1 polypeptide” includes allelic variants, e.g., naturally occurring allelic variants. Thus, in some cases, a suitable DQA1 polypeptide comprises the following amino acid sequence: EDIVADH VASCGVNLYQ FYGPSGQYTH EFDGDEQFYV DLERKETAWR WPEFSKFGGF DPQGALRNMA VAKHNLNIMI KRYNSTAATN EVPEVTVFSK SPVTLGQPNT LICLVDNIFP PVVNITWLSN GQSVTEGVSE TSFLSKSDHS FFKISYLTFL PSADEIYDCK VEHWGLDQPL LKHW (SEQ ID NO: 18), or an allelic variant thereof.

[0116] A suitable DQA1 α1 domain comprises an amino acid sequence having at least 60%, at least 70%, at least 80%, at least 90%, at least 95%, at least 98%, at least 99%, or 100%, amino acid sequence identity to the following amino acid sequence: EDIVADH VASCGVNLYQ FYGPSGQYTH EFDGDEQFYV DLERKETAWR WPEFSKFGGF DPQGALRNMA VAKHNLNIMI KRYNSTAATN (SEQ ID NO: 19); and can have a length of about 87 amino acids (e.g., 84, 85, 86, 87, 88, or 89 amino acids). A suitable DQA1 α1 domain can comprise the following amino acid sequence: EDIVADH VASCGVNLYQ FYGPSGQYTH EFDGDEQFYV DLERKETAWR WPEFSKFGGF DPQGALRNMA VAKHNLNIMI KRYNSTAATN (SEQ ID NO: 19), or a naturally-occurring allelic variant.

[0117] A suitable DQA1 α2 domain comprises an amino acid sequence having at least 60%, at least 70%, at least 80%, at least 90%, at least 95%, at least 98%, at least 99%, or 100%, amino acid sequence identity to the following amino acid sequence: EVPEVTVFSK SPVTLGQPNT LICLVDNIFP PVVNITWLSN GQSVTEGVSE TSFLSKSDHS FFKISYLTFL PSADEIYDCK VEHWGLDQPL LKHW (SEQ ID NO: 20); and can have a length of about 94 amino acids (e.g., 91, 92, 93, 94, 95, 96, or 97 amino acids). A suitable DQA1 α2 domain can comprise the following amino acid sequence: EVPEVTVFSK SPVTLGQPNT LICLVDNIFP PVVNITWLSN GQSVTEGVSE TSFLSKSDHS FFKISYLTFL PSADEIYDCK VEHWGLDQPL LKHW (SEQ ID NO: 20), or a naturally-occurring allelic variant thereof.

### DQA2

[0118] In some cases, a suitable MHC Class II α chain polypeptide is a DQA2 polypeptide. A DQA2 polypeptide can have at least 60%, at least 70%, at least 80%, at least 90%, at least 95%, at least 98%, at least 99%, or 100%, amino acid sequence identity with amino acids 24-204 of the DQA2 amino acid sequence depicted in FIG. 18. In some cases, the DQA2 polypeptide has a length of about 181 amino acids (e.g., 177, 178, 179, 180, 181, 182, or 183 amino acids).

[0119] A “DQA2 polypeptide” includes allelic variants, e.g., naturally occurring allelic variants. Thus, in some cases, a suitable DQA2 polypeptide comprises the following amino acid sequence: EDIVADH VASYGVNFYQ SHGPSGQYTH EFDGDEEFYV DLETKETVWQ LPMFSKFISF DPQSALRNMA VGKHTLEFMM RQSNSTAATN EVPEVTVFSK FPVTLGQPNT LICLVDNIFP PVVNITWLSN GHSVTEGVSE TSFLSKSDHS FFKISYLTFL PSADEIYDCK VEHWGLDEPL LKHW (SEQ ID NO: 21), or an allelic variant thereof.

[0120] A suitable DQA2 α1 domain comprises an amino acid sequence having at least 60%, at least 70%, at least 80%, at least 90%, at least 95%, at least 98%, at least 99%, or 100%, amino acid sequence identity to the following amino acid sequence: EDIVADH VASYGVNFYQ SHGPSGQYTH EFDGDEEFYV DLETKETVWQ LPMFSKFISF DPQSALRNMA VGKHTLEFMM RQSNSTAATN (SEQ ID NO: 22); and can have a length of about 87 amino acids (e.g., 84, 85, 86, 87, 88, or 89 amino acids). A suitable DQA2 α1 domain can comprise the following amino acid sequence: EDIVADH VASYGVNFYQ SHGPSGQYTH EFDGDEEFYV DLETKETVWQ LPMFSKFISF DPQSALRNMA VGKHTLEFMM RQSNSTAATN (SEQ ID NO: 22), or a naturally-occurring allelic variant.

[0121] A suitable DQA2 α2 domain comprises an amino acid sequence having at least 60%, at least 70%, at least 80%, at least 90%, at least 95%, at least 98%, at least 99%, or 100%, amino acid sequence identity to the following amino acid sequence: EVPEVTVFSK FPVTLGQPNT LICLVDNIFP PVVNITWLSN GHSVTEGVSE TSFLSKSDHS FFKISYLTFL PSADEIYDCK VEHWGLDEPL LKHW (SEQ ID NO: 23); and can have a length of about 94 amino acids (e.g., 91, 92, 93, 94, 95, 96, or 97 amino acids). A suitable DQA2 α2 domain can comprise the following amino acid sequence: EVPEVTVFSK FPVTLGQPNT LICLVDNIFP PVVNITWLSN GHSVTEGVSE TSFLSKSDHS FFKISYLTFL PSADEIYDCK VEHWGLDEPL LKHW (SEQ ID NO: 23), or a naturally-occurring allelic variant thereof.

### MHC Class II Beta Chains

[0122] MHC Class II beta chains comprise a β1 domain and a β2 domain. In some cases, the β1 domain and the β2 domain present in an antigen-presenting cell are from the same MHC Class II β chain polypeptide. In some cases, the β1 domain and the β2 domain present in an antigen-presenting cell are from two different MHC Class II β chain polypeptides.

[0123] MHC Class II beta chains suitable for inclusion in a TMAPP (e.g., a multimeric TMAPP; a single-chain TMAPP) of the present disclosure lack a signal peptide. An MHC Class II beta chain suitable for inclusion in a TMAPP of the present disclosure can have a length of from about 60 amino acids to about 210 amino acids; for example, an MHC Class II beta chain suitable for inclusion in a TMAPP of the present disclosure can have a length of from about 60 amino acids to about 80 amino acids, from about 80 amino acids to about 100 amino acids, from about 100 amino acids to about 120 amino acids, from about 120 amino acids to about 140 amino acids, from about 140 amino acids to about 160 amino acids, from about 160 amino acids to about 180 amino acids, from about 180 amino acids to about 200 amino acids, or from about 200 amino acids to about 210 amino acids. An MHC Class II β1 domain suitable for inclusion in a TMAPP of the present disclosure can have a length of from about 30 amino acids to about 105 amino acids; for example, an MHC Class II β1 domain suitable for inclusion in a TMAPP of the present disclosure can have a length of from about 30 amino acids to about 40 amino acids, from about 40 amino acids to about 50 amino acids, from about 50 amino acids to about 60 amino acids, from about 60 amino acids to about 70 amino acids, from about 70 amino acids to about 80 amino acids, from about 80 amino acids to about 90 amino acids, from about 90 amino acids to about 95 amino acids, from about 95 amino acids to about 100 amino acids, or from about 100 amino acids to about 105 amino acids. An MHC Class II β2 domain suitable for inclusion in a TMAPP of the present disclosure can have a length of from about 30 amino acids to about 105 amino acids; for example, an MHC Class II β2 domain suitable for inclusion in a TMAPP of the present disclosure can have a length of from about 30 amino acids to about 40 amino acids, from about 40 amino acids to about 50 amino acids, from about 50 amino acids to about 60 amino acids, from about 60 amino acids to about 70 amino acids, from about 70 amino acids to about 80 amino acids, from about 80 amino acids to about 90 amino acids, from about 90 amino acids to about 95 amino acids, from about 95 amino acids to about 100 amino acids, or from about 100 amino acids to about 105 amino acids.

### DRB1

[0124] In some cases, a suitable MHC Class II β chain polypeptide is a DRB1 polypeptide. In an embodiment, a DRB1 polypeptide can have at least 60%, at least 70%, at least 80%, at least 90%, at least 95%, at least 98%, at least 99%, or 100%, amino acid sequence identity with amino acids 30-227 of any DRB1 amino acid sequence depicted in FIG. 7, which displays the DRB1 precursor proteins in which amino acids 1-29 are the signal sequence (underlined), 30-124 form the β1 region (bolded), 125-227 for the β2 region (bolded and underlined), and 228-250 the transmembrane region.

[0125] In an embodiment, a DRB1 β chain polypeptide can have at least 60%, at least 70%, at least 80%, at least 90%, at least 95%, at least 98%, at least 99%, or 100%, amino acid sequence identity with amino acids 30-227 of the DRB1-1 (DRB1*01:01) beta chain amino acid sequence Swiss-Prot/UniProt reference (“sp”) P04229.2 in FIG. 7. In an embodiment, a DRB1 β chain polypeptide can have at least 60%, at least 70%, at least 80%, at least 90%, at least 95%, at least 98%, at least 99%, or 100%, amino acid sequence identity with amino acids 30-227 of the DRB1-3 (DRB1*03:01) beta chain amino acid sequence sp P01912.2 in FIG. 7. In an embodiment, a DRB1 β chain polypeptide can have at least 60%, at least 70%, at least 80%, at least 90%, at least 95%, at least 98%, at least 99%, or 100%, amino acid sequence identity with amino acids 30-227 of the DRB1-4 (DRB1*04:01) beta chain amino acid sequence sp P13760.1 in FIG. 7. In an embodiment, a DRB1 β chain polypeptide can have at least 60%, at least 70%, at least 80%, at least 90%, at least 95%, at least 98%, at least 99%, or 100%, amino acid sequence identity with amino acids 30-227 of the DRB1-7 (DRB1*07:01) beta chain amino acid sequence sp P13761.1 in FIG. 7. In an embodiment, a DRB1 β chain polypeptide can have at least 60%, at least 70%, at least 80%, at least 90%, at least 95%, at least 98%, at least 99%, or 100%, amino acid sequence identity with amino acids 30-227 of the DRB1-8 (DRB1*08:01) beta chain amino acid sequence sp Q30134.2 in FIG. 7. In an embodiment, a DRB1 β chain polypeptide can have at least 60%, at least 70%, at least 80%, at least 90%, at least 95%, at least 98%, at least 99%, or 100%, amino acid sequence identity with amino acids 30-227 of the DRB1-9 (DRB1*09:01) beta chain amino acid sequence sp Q9TQE0.1 in FIG. 7. In an embodiment, a DRB1 β chain polypeptide can have at least 60%, at least 70%, at least 80%, at least 90%, at least 95%, at least 98%, at least 99%, or 100%, amino acid sequence identity with amino acids 30-227 of the DRB1-10 (DRB1*10:01) beta chain amino acid sequence sp Q30167.2 in FIG. 7. In an embodiment, a DRB1 β chain polypeptide can have at least 60%, at least 70%, at least 80%, at least 90%, at least 95%, at least 98%, at least 99%, or 100%, amino acid sequence identity with amino acids 30-227 of the DRB1-11 (DRB1*11:01) beta chain amino acid sequence sp P20039.1 in FIG. 7. In an embodiment, a DRB1 β chain polypeptide can have at least 60%, at least 70%, at least 80%, at least 90%, at least 95%, at least 98%, at least 99%, or 100%, amino acid sequence identity with amino acids 30-227 of the DRB1-12 (DRB1*12:01) beta chain amino acid sequence sp Q95IE3.1 in FIG. 7. In an embodiment, a DRB1 β chain polypeptide can have at least 60%, at least 70%, at least 80%, at least 90%, at least 95%, at least 98%, at least 99%, or 100%, amino acid sequence identity with amino acids 30-227 of the DRB1-13 (DRB1*13:01) beta chain amino acid sequence sp Q5Y7A7.1 in FIG. 7. In an embodiment, a DRB1 β chain polypeptide can have at least 60%, at least 70%, at least 80%, at least 90%, at least 95%, at least 98%, at least 99%, or 100%, amino acid sequence identity with amino acids 30-227 of the DRB1-14 (DRB1*14:01) beta chain amino acid sequence sp Q9GIY3.1 in FIG. 7. In an embodiment, a DRB1 β chain polypeptide can have at least 60%, at least 70%, at least 80%, at least 90%, at least 95%, at least 98%, at least 99%, or 100%, amino acid sequence identity with amino acids 30-227 of the DRB1-15 (DRB1*15:01) beta chain amino acid sequence sp P01911 in FIG. 7. In an embodiment, a DRB1 β chain polypeptide can have at least 60%, at least 70%, at least 80%, at least 90%, at least 95%, at least 98%, at least 99%, or 100%, amino acid sequence identity with amino acids 30-227 of the DRB1-16 (DRB1*16:01) beta chain amino acid sequence sp Q29974.1 in FIG. 7. In some cases, the DRB1 β chain polypeptide has a length of about 198 amino acids (e.g., 195, 196, 197, 198, 199, 200, 201, or 202 amino acids).

[0126] A “DRB1 polypeptide” includes allelic variants, e.g., naturally occurring allelic variants. Thus, in some cases, a suitable DRB1 polypeptide comprises the following amino acid sequence: DTRPRFLEQVKHECHFFNGTERVRFLDRYFYHQEEYVRFDSDVGEYRAVTELGRPDAE YWNSQKDLLEQKRAAVDTYCRHNYGVGESFTVQRRVYPEVTVYPAKTQPLQHHNLLV CSVNGFYPGSIEVRWFRNGQEEKTGVVSTGLIQNGDWTFQTLVMLETVPRSGEVYTCQ VEHPSLTSPLTVEWRARSESAQSK (SEQ ID NO: 24) (amino acids 31-227 of DRB1-4, see FIG. 7A), or an allelic variant thereof.

[0127] A suitable DRB1 β1 domain comprises an amino acid sequence having at least 60%, at least 70%, at least 80%, at least 90%, at least 95%, at least 98%, at least 99%, or 100%, amino acid sequence identity to the following amino acid sequence: DTRPRFLEQVKHECHFFNGTERVRFLDRYFYHQEEYVRFDSDVGEYRAVTELGRPDAE YWNSQKDLLEQKRAAVDTYCRHNYGVGESFTVQRRV (SEQ ID NO: 25); and can have a length of about 95 amino acids (e.g., 92, 93, 94, 95, 96, 97, or 98 amino acids). A suitable DRB1 β1 domain can comprise the following amino acid sequence: DTRPRFLEQVKHECHFFNGTERVRFLDRYFYHQEEYVRFDSDVGEYRAVTELGRPDAE YWNSQKDLLEQKRAAVDTYCRHNYGVGESFTVQRRV (SEQ ID NO: 25), or a naturally-occurring allelic variant.

[0128] A suitable DRB1 β2 domain comprises an amino acid sequence having at least 60%, at least 70%, at least 80%, at least 90%, at least 95%, at least 98%, at least 99%, or 100%, amino acid sequence identity to the following amino acid sequence: YPEVTVYPAKTQPLQHHNLLVCSVNGFYPGSIEVRWFRNGQEEKTGVVSTGLIQNGDW TFQTLVMLETVPRSGEVYTCQVEHPSLTSPLTVEWRARSESAQSK (SEQ ID NO: 26); and can have a length of about 103 amino acids (e.g., 100, 101, 102, 103, 104, 105, or 106 amino acids). A suitable DRB1 β2 domain can comprise the following amino acid sequence: YPEVTVYPAKTQPLQHHNLLVCSVNGFYPGSIEVRWFRNGQEEKTGVVSTGLIQNGDW TFQTLVMLETVPRSGEVYTCQVEHPSLTSPLTVEWRARSESAQSK (SEQ ID NO: 26), or a naturally-occurring allelic variant thereof.

### DRB3

[0129] In some cases, a suitable MHC Class II β chain polypeptide is a DRB3 polypeptide. In an embodiment, a DRB3 polypeptide can have at least 60%, at least 70%, at least 80%, at least 90%, at least 95%, at least 98%, at least 99%, or 100%, amino acid sequence identity with amino acids 30-227 of any DRB3 amino acid sequence depicted in FIG. 8, which displays the DRB3 precursor proteins in which amino acids 1-29 are the signal sequence (underlined), 30-124 form the β1 region (shown bolded), 125-227 for the β2 region, and 228-250 the transmembrane region. In an embodiment, a DRB3 β chain polypeptide can have at least 60%, at least 70%, at least 80%, at least 90%, at least 95%, at least 98%, at least 99%, or 100%, amino acid sequence identity with amino acids 30-227 of the DRB1-3 (DRB3*01:01) beta chain amino acid sequence GenBank NP_072049.1 in FIG. 8. In an embodiment, a DRB3 β chain polypeptide can have at least 60%, at least 70%, at least 80%, at least 90%, at least 95%, at least 98%, at least 99%, or 100%, amino acid sequence identity with amino acids 30-227 of the DRB1-3 beta chain amino acid sequence in GenBank accession EAX03632.1 in FIG. 8. In an embodiment, a DRB3 β chain polypeptide can have at least 60%, at least 70%, at least 80%, at least 90%, at least 95%, at least 98%, at least 99%, or 100%, amino acid sequence identity with amino acids 30-227 of the DRB1-3 (DRB3*02:01) beta chain amino acid sequence GenBank CAA23781.1 in FIG. 8. In an embodiment, a DRB3 β chain polypeptide can have at least 60%, at least 70%, at least 80%, at least 90%, at least 95%, at least 98%, at least 99%, or 100%, amino acid sequence identity with amino acids 30-227 of the DRB1-3 (DRB3*03:01) beta chain amino acid sequence GenBank AAN15205.1 in FIG. 8.

[0130] A “DRB3 polypeptide” includes allelic variants, e.g., naturally occurring allelic variants. Thus, in some cases, a suitable DRB3 polypeptide comprises the following amino acid sequence: DTRPRFLELR KSECHFFNGT ERVRYLDRYF HNQEEFLRFD SDVGEYRAVT ELGRPVAESW NSQKDLLEQK RGRVDNYCRH NYGVGESFTV QRRVHPQVTV YPAKTQPLQH HNLLVCSVSG FYPGSIEVRW FRNGQEEKAG VVSTGLIQNG DWTFQTLVML ETVPRSGEVY TCQVEHPSVT SALTVEWRAR SESAQSK (SEQ ID NO: 27), or an allelic variant thereof.

[0131] A suitable DRB3 β1 domain comprises an amino acid sequence having at least 60%, at least 70%, at least 80%, at least 90%, at least 95%, at least 98%, at least 99%, or 100%, amino acid sequence identity to the following amino acid sequence: DTRPRFLELR KSECHFFNGT ERVRYLDRYF HNQEEFLRFD SDVGEYRAVT ELGRPVAESW NSQKDLLEQK RGRVDNYCRH NYGVGESFTV QRRV (SEQ ID NO: 28); and can have a length of about 95 amino acids (e.g., 93, 94, 95, 96, 97, or 98 amino acids). A suitable DRB3 β1 domain can comprise the following amino acid sequence: DTRPRFLELR KSECHFFNGT ERVRYLDRYF HNQEEFLRFD SDVGEYRAVT ELGRPVAESW NSQKDLLEQK RGRVDNYCRH NYGVGESFTV QRRV (SEQ ID NO: 28), or a naturally-occurring allelic variant.

[0132] A suitable DRB3 β2 domain comprises an amino acid sequence having at least 60%, at least 70%, at least 80%, at least 90%, at least 95%, at least 98%, at least 99%, or 100%, amino acid sequence identity to the following amino acid sequence: HPQVTV YPAKTQPLQH HNLLVCSVSG FYPGSIEVRW FRNGQEEKAG VVSTGLIQNG DWTFQTLVML ETVPRSGEVY TCQVEHPSVT SALTVEWRAR SESAQSK (SEQ ID NO: 29); and can have a length of about 103 amino acids (e.g., 100, 101, 102, 103, 104, or 105 amino acids). A suitable DRB3 β2 domain can comprise the following amino acid sequence: HPQVTV YPAKTQPLQH HNLLVCSVSG FYPGSIEVRW FRNGQEEKAG VVSTGLIQNG DWTFQTLVML ETVPRSGEVY TCQVEHPSVT SALTVEWRAR SESAQSK (SEQ ID NO: 29), or a naturally-occurring allelic variant thereof.

### DRB4

[0133] In some cases, a suitable MHC Class II β chain polypeptide is a DRB4 polypeptide. A DRB4 polypeptide can have at least 60%, at least 70%, at least 80%, at least 90%, at least 95%, at least 98%, at least 99%, or 100%, amino acid sequence identity with amino acids 30-227 of the DRB4 amino acid sequence depicted in FIG. 9. In some cases, the DRB4 polypeptide has a length of about 198 amino acids (e.g., 195, 196, 197, 198, 199, 200, 201, or 202 amino acids).

[0134] A “DRB4 polypeptide” includes allelic variants, e.g., naturally occurring allelic variants. Thus, in some cases, a suitable DRB4 polypeptide comprises the following amino acid sequence: T VLSSPLALAG DTQPRFLEQA KCECHFLNGT ERVWNLIRYI YNQEEYARYN SDLGEYQAVT ELGRPDAEYW NSQKDLLERR RAEVDTYCRY NYGVVESFTV QRRVQPKVTV YPSKTQPLQH HNLLVCSVNG FYPGSIEVRW FRNGQEEKAG VVSTGLIQNG DWTFQTLVML ETVPRSGEVY TCQVEHPSMM SPLTVQWSAR SESAQSK (SEQ ID NO: 30), or an allelic variant thereof.

[0135] A suitable DRB4 β1 domain comprises an amino acid sequence having at least 60%, at least 70%, at least 80%, at least 90%, at least 95%, at least 98%, at least 99%, or 100%, amino acid sequence identity to the following amino acid sequence: T VLSSPLALAG DTQPRFLEQA KCECHFLNGT ERVWNLIRYI YNQEEYARYN SDLGEYQAVT ELGRPDAEYW NSQKDLLERR RAEVDTYCRY NYGVVESFTV QRRV (SEQ ID NO: 31); and can have a length of about 95 amino acids (e.g., 93, 94, 95, 96, 97, or 98 amino acids). A suitable DRB4 β1 domain can comprise the following amino acid sequence: T VLSSPLALAG DTQPRFLEQA KCECHFLNGT ERVWNLIRYI YNQEEYARYN SDLGEYQAVT ELGRPDAEYW NSQKDLLERR RAEVDTYCRY NYGVVESFTV QRRV (SEQ ID NO: 31), or a naturally-occurring allelic variant.

[0136] A suitable DRB4 β2 domain comprises an amino acid sequence having at least 60%, at least 70%, at least 80%, at least 90%, at least 95%, at least 98%, at least 99%, or 100%, amino acid sequence identity to the following amino acid sequence: QPKVTV YPSKTQPLQH HNLLVCSVNG FYPGSIEVRW FRNGQEEKAG VVSTGLIQNG DWTFQTLVML ETVPRSGEVY TCQVEHPSMM SPLTVQWSAR SESAQSK (SEQ ID NO: 32); and can have a length of about 103 amino acids (e.g., 100, 101, 102, 103, 104, or 105 amino acids). A suitable DRB4 β2 domain can comprise the following amino acid sequence: QPKVTV YPSKTQPLQH HNLLVCSVNG FYPGSIEVRW FRNGQEEKAG VVSTGLIQNG DWTFQTLVML ETVPRSGEVY TCQVEHPSMM SPLTVQWSAR SESAQSK (SEQ ID NO: 32), or a naturally-occurring allelic variant thereof.

### DRB5

[0137] In some cases, a suitable MHC Class II β chain polypeptide is a DRB5 polypeptide. A DRB5 polypeptide can have at least 60%, at least 70%, at least 80%, at least 90%, at least 95%, at least 98%, at least 99%, or 100%, amino acid sequence identity with amino acids 30-227 of the DRB5 amino acid sequence depicted in FIG. 10. In some cases, the DRB5 polypeptide has a length of about 198 amino acids (e.g., 195, 196, 197, 198, 199, 200, 201, or 202 amino acids).

[0138] A “DRB5 polypeptide” includes allelic variants, e.g., naturally occurring allelic variants. Thus, in some cases, a suitable DRB5 polypeptide comprises the following amino acid sequence: M VLSSPLALAG DTRPRFLQQD KYECHFFNGT ERVRFLHRDI YNQEEDLRFD SDVGEYRAVT ELGRPDAEYW NSQKDFLEDR RAAVDTYCRH NYGVGESFTV QRRVEPKVTV YPARTQTLQH HNLLVCSVNG FYPGSIEVRW FRNSQEEKAG VVSTGLIQNG DWTFQTLVML ETVPRSGEVY TCQVEHPSVT SPLTVEWRAQ SESAQS (SEQ ID NO: 33), or an allelic variant thereof.

[0139] A suitable DRB5 β1 domain comprises an amino acid sequence having at least 60%, at least 70%, at least 80%, at least 90%, at least 95%, at least 98%, at least 99%, or 100%, amino acid sequence identity to the following amino acid sequence: M VLSSPLALAG DTRPRFLQQD KYECHFFNGT ERVRFLHRDI YNQEEDLRFD SDVGEYRAVT ELGRPDAEYW NSQKDFLEDR RAAVDTYCRH NYGVGESFTV QRRV (SEQ ID NO: 34); and can have a length of about 95 amino acids (e.g., 93, 94, 95, 96, 97, or 98 amino acids). A suitable DRB5 β1 domain can comprise the following amino acid sequence: M VLSSPLALAG DTRPRFLQQD KYECHFFNGT ERVRFLHRDI YNQEEDLRFD SDVGEYRAVT ELGRPDAEYW NSQKDFLEDR RAAVDTYCRH NYGVGESFTV QRRV (SEQ ID NO: 34), or a naturally-occurring allelic variant.

[0140] A suitable DRB5 β2 domain comprises an amino acid sequence having at least 60%, at least 70%, at least 80%, at least 90%, at least 95%, at least 98%, at least 99%, or 100%, amino acid sequence identity to the following amino acid sequence: EPKVTV YPARTQTLQH HNLLVCSVNG FYPGSIEVRW FRNSQEEKAG VVSTGLIQNG DWTFQTLVML ETVPRSGEVY TCQVEHPSVT SPLTVEWRAQ SESAQS (SEQ ID NO: 35); and can have a length of about 103 amino acids (e.g., 100, 101, 102, 103, 104, or 105 amino acids). A suitable DRB5 β2 domain can comprise the following amino acid sequence: EPKVTV YPARTQTLQH HNLLVCSVNG FYPGSIEVRW FRNSQEEKAG VVSTGLIQNG DWTFQTLVML ETVPRSGEVY TCQVEHPSVT SPLTVEWRAQ SESAQS (SEQ ID NO: 35), or a naturally-occurring allelic variant thereof.

### DMB

[0141] In some cases, a suitable MHC Class II β chain polypeptide is a DMB polypeptide. A DMB polypeptide can have at least 60%, at least 70%, at least 80%, at least 90%, at least 95%, at least 98%, at least 99%, or 100%, amino acid sequence identity with amino acids 19-207 of the DMB amino acid sequence depicted in FIG. 12. In some cases, the DMB polypeptide has a length of about 189 amino acids (e.g., 187, 188, 189, 190, or 191 amino acids).

[0142] A “DMB polypeptide” includes allelic variants, e.g., naturally occurring allelic variants. Thus, in some cases, a suitable DMB polypeptide comprises the following amino acid sequence: GG FVAHVESTCL LDDAGTPKDF TYCISFNKDL LTCWDPEENK MAPCEFGVLN SLANVLSQHL NQKDTLMQRL RNGLQNCATH TQPFWGSLTN RTRPPSVQVA KTTPFNTREP VMLACYVWGF YPAEVTITWR KNGKLVMPHS SAHKTAQPNG DWTYQTLSHL ALTPSYGDTY TCVVEHTGAP EPILRDW (SEQ ID NO: 36), or an allelic variant thereof.

[0143] A suitable DMB β1 domain comprises an amino acid sequence having at least 60%, at least 70%, at least 80%, at least 90%, at least 95%, at least 98%, at least 99%, or 100%, amino acid sequence identity to the following amino acid sequence: GG FVAHVESTCL LDDAGTPKDF TYCISFNKDL LTCWDPEENK MAPCEFGVLN SLANVLSQHL NQKDTLMQRL RNGLQNCATH TQPFWGSLTN RT (SEQ ID NO: 37); and can have a length of about 94 amino acids (e.g., 92, 93, 94, 95, 96, or 97 amino acids). A suitable DMB β1 domain can comprise the following amino acid sequence: GG FVAHVESTCL LDDAGTPKDF TYCISFNKDL LTCWDPEENK MAPCEFGVLN SLANVLSQHL NQKDTLMQRL RNGLQNCATH TQPFWGSLTN RT (SEQ ID NO: 37), or a naturally-occurring allelic variant.

[0144] A suitable DMB β2 domain comprises an amino acid sequence having at least 60%, at least 70%, at least 80%, at least 90%, at least 95%, at least 98%, at least 99%, or 100%, amino acid sequence identity to the following amino acid sequence: RPPSVQVA KTTPFNTREP VMLACYVWGF YPAEVTITWR KNGKLVMPHS SAHKTAQPNG DWTYQTLSHL ALTPSYGDTY TCVVEHTGAP EPILRDW (SEQ ID NO: 38); and can have a length of about 95 amino acids (e.g., 93, 94, 95, 96, 97, or 98 amino acids). A suitable DMB β2 domain can comprise the following amino acid sequence: RPPSVQVA KTTPFNTREP VMLACYVWGF YPAEVTITWR KNGKLVMPHS SAHKTAQPNG DWTYQTLSHL ALTPSYGDTY TCVVEHTGAP EPILRDW (SEQ ID NO: 38), or a naturally-occurring allelic variant thereof.

### DOB

[0145] In some cases, a suitable MHC Class II β chain polypeptide is a DOB polypeptide. A DOB polypeptide can have at least 60%, at least 70%, at least 80%, at least 90%, at least 95%, at least 98%, at least 99%, or 100%, amino acid sequence identity with amino acids 27-214 of the DOB amino acid sequence depicted in FIG. 14. In some cases, the DOB polypeptide has a length of about 188 amino acids (e.g., 186, 187, 188, 189, or 190 amino acids).

[0146] A “DOB polypeptide” includes allelic variants, e.g., naturally occurring allelic variants. Thus, in some cases, a suitable DOB polypeptide comprises the following amino acid sequence: TDSP EDFVIQAKAD CYFTNGTEKV QFVVRFIFNL EEYVRFDSDV GMFVALTKLG QPDAEQWNSR LDLLERSRQA VDGVCRHNYR LGAPFTVGRK VQPEVTVYPE RTPLLHQHNL LHCSVTGFYP GDIKIKWFLN GQEERAGVMS TGPIRNGDWT FQTVVMLEMT PELGHVYTCL VDHSSLLSPV SVEW (SEQ ID NO: 39), or an allelic variant thereof.

[0147] A suitable DOB β1 domain comprises an amino acid sequence having at least 60%, at least 70%, at least 80%, at least 90%, at least 95%, at least 98%, at least 99%, or 100%, amino acid sequence identity to the following amino acid sequence: TDSP EDFVIQAKAD CYFTNGTEKV QFVVRFIFNL EEYVRFDSDV GMFVALTKLG QPDAEQWNSR LDLLERSRQA VDGVCRHNYR LGAPFTVGRK (SEQ ID NO: 40); and can have a length of about 94 amino acids (e.g., 92, 93, 94, 95, 96, or 97 amino acids). A suitable DOB β1 domain can comprise the following amino acid sequence: TDSP EDFVIQAKAD CYFTNGTEKV QFVVRFIFNL EEYVRFDSDV GMFVALTKLG QPDAEQWNSR LDLLERSRQA VDGVCRHNYR LGAPFTVGRK (SEQ ID NO: 40), or a naturally-occurring allelic variant.

[0148] A suitable DOB β2 domain comprises an amino acid sequence having at least 60%, at least 70%, at least 80%, at least 90%, at least 95%, at least 98%, at least 99%, or 100%, amino acid sequence identity to the following amino acid sequence: VQPEVTVYPE RTPLLHQHNL LHCSVTGFYP GDIKIKWFLN GQEERAGVMS TGPIRNGDWT FQTVVMLEMT PELGHVYTCL VDHSSLLSPV SVEW (SEQ ID NO: 41); and can have a length of about 94 amino acids (e.g., 92, 93, 94, 95, 96, or 97 amino acids). A suitable DOB β2 domain can comprise the following amino acid sequence: VQPEVTVYPE RTPLLHQHNL LHCSVTGFYP GDIKIKWFLN GQEERAGVMS TGPIRNGDWT FQTVVMLEMT PELGHVYTCL VDHSSLLSPV SVEW (SEQ ID NO: 41), or a naturally-occurring allelic variant thereof.

### DPB1

[0149] In some cases, a suitable MHC Class II β chain polypeptide is a DPB1 polypeptide. A DPB1 polypeptide can have at least 60%, at least 70%, at least 80%, at least 90%, at least 95%, at least 98%, at least 99%, or 100%, amino acid sequence identity with amino acids 30-215 of any of the DPB1 amino acid sequences depicted in FIG. 16. In some cases, the DPB1 polypeptide has a length of about 186 amino acids (e.g., 184, 185, 186, 187, or 188 amino acids). In an embodiment, a DRB3 β chain polypeptide can have at least 60%, at least 70%, at least 80%, at least 90%, at least 95%, at least 98%, at least 99%, or 100%, amino acid sequence identity with amino acids 30-227 of the DPB1*01:01 beta chain amino acid sequence in FIG. 16 IMGT/HLA Acc No: HLA00514. In an embodiment, a DRB3 β chain polypeptide can have at least 60%, at least 70%, at least 80%, at least 90%, at least 95%, at least 98%, at least 99%, or 100%, amino acid sequence identity with amino acids 30-227 of the DPB1*01:01 beta chain amino acid sequence in FIG. 16, IMGT/HLA Acc No: HLA00517. In an embodiment, a DRB3 β chain polypeptide can have at least 60%, at least 70%, at least 80%, at least 90%, at least 95%, at least 98%, at least 99%, or 100%, amino acid sequence identity with amino acids 30-227 of the DPB1*03:01 beta chain amino acid sequence in FIG. 16, IMGT/HLA Acc No: HLA00520. In an embodiment, a DRB3 β chain polypeptide can have at least 60%, at least 70%, at least 80%, at least 90%, at least 95%, at least 98%, at least 99%, or 100%, amino acid sequence identity with amino acids 30-227 of the DPB1*04:01 beta chain amino acid sequence in FIG. 16, IMGT/HLA Acc No: HLA00521, GenBank NP_002112.3. In an embodiment, a DRB3 β chain polypeptide can have at least 60%, at least 70%, at least 80%, at least 90%, at least 95%, at least 98%, at least 99%, or 100%, amino acid sequence identity with amino acids 30-227 of the DPB106:01 beta chain amino acid sequence in FIG. 16, IMGT/HLA Acc No: HLA00524. In an embodiment, a DRB3 β chain polypeptide can have at least 60%, at least 70%, at least 80%, at least 90%, at least 95%, at least 98%, at least 99%, or 100%, amino acid sequence identity with amino acids 30-227 of the DPB1*11:01 beta chain amino acid sequence in FIG. 16, IMGT/HLA Acc No: HLA00528. In an embodiment, a DRB3 β chain polypeptide can have at least 60%, at least 70%, at least 80%, at least 90%, at least 95%, at least 98%, at least 99%, or 100%, amino acid sequence identity with amino acids 30-227 of the DPB1*71:01 beta chain amino acid sequence in FIG. 16, IMGT/HLA Acc No:HLA00590. In an embodiment, a DRB3 β chain polypeptide can have at least 60%, at least 70%, at least 80%, at least 90%, at least 95%, at least 98%, at least 99%, or 100%, amino acid sequence identity with amino acids 30-227 of the DPB1*104:01 beta chain amino acid sequence in FIG. 16, IMGT/HLA Acc No: HLA02046. In an embodiment, a DRB3 β chain polypeptide can have at least 60%, at least 70%, at least 80%, at least 90%, at least 95%, at least 98%, at least 99%, or 100%, amino acid sequence identity with amino acids 30-227 of the DPB1*141:01 beta chain amino acid sequence in FIG. 16, IMGT/HLA Acc No: HLA10364.

[0150] A “DPB1 polypeptide” includes allelic variants, e.g., naturally occurring allelic variants. Thus, in some cases, a suitable DPB1 polypeptide comprises the following amino acid sequence: R ATPENYLFQG RQECYAFNGT QRFLERYIYN REEFARFDSD VGEFRAVTEL GRPAAEYWNS QKDILEEKRA VPDRMCRHNY ELGGPMTLQR RVQPRVNVSP SKKGPLQHHN LLVCHVTDFY PGSIQVRWFL NGQEETAGVV STNLIRNGDW TFQILVMLEM TPQQGDVYTC QVEHTSLDSP VTVEW (SEQ ID NO: 42), or an allelic variant thereof.

[0151] A suitable DPB1 β1 domain comprises an amino acid sequence having at least 60%, at least 70%, at least 80%, at least 90%, at least 95%, at least 98%, at least 99%, or 100%, amino acid sequence identity to the following amino acid sequence: R ATPENYLFQG RQECYAFNGT QRFLERYIYN REEFARFDSD VGEFRAVTEL GRPAAEYWNS QKDILEEKRA VPDRMCRHNY ELGGPMTLQR R (SEQ ID NO: 43); and can have a length of about 92 amino acids (e.g., 90, 91, 92, 93, or 94 amino acids). A suitable DPB1 β1 domain can comprise the following amino acid sequence: R ATPENYLFQG RQECYAFNGT QRFLERYIYN REEFARFDSD VGEFRAVTEL GRPAAEYWNS QKDILEEKRA VPDRMCRHNY ELGGPMTLQR R (SEQ ID NO: 43), or a naturally-occurring allelic variant.

[0152] A suitable DPB1 β2 domain comprises an amino acid sequence having at least 60%, at least 70%, at least 80%, at least 90%, at least 95%, at least 98%, at least 99%, or 100%, amino acid sequence identity to the following amino acid sequence: VQPRVNVSP SKKGPLQHHN LLVCHVTDFY PGSIQVRWFL NGQEETAGVV STNLIRNGDW TFQILVMLEM TPQQGDVYTC QVEHTSLDSP VTVEW (SEQ ID NO: 44); and can have a length of about 94 amino acids (e.g., 92, 93, 94, 95, 96, or 97 amino acids). A suitable DPB1 β2 domain can comprise the following amino acid sequence: VQPRVNVSP SKKGPLQHHN LLVCHVTDFY PGSIQVRWFL NGQEETAGVV STNLIRNGDW TFQILVMLEM TPQQGDVYTC QVEHTSLDSP VTVEW (SEQ ID NO: 44), or a naturally-occurring allelic variant thereof.

### DQB1

[0153] In some cases, a suitable MHC Class II β chain polypeptide is a DQB1 polypeptide. A DQB1 polypeptide can have at least 60%, at least 70%, at least 80%, at least 90%, at least 95%, at least 98%, at least 99%, or 100%, amino acid sequence identity with amino acids 33-220 of the DQB1 amino acid sequence depicted in FIG. 19A or FIG. 19B or FIG. 19C. In some cases, the DQB1 polypeptide has a length of about 188 amino acids (e.g., 186, 187, 188, 190, 191, or 192 amino acids).

[0154] A “DQB1 polypeptide” includes allelic variants, e.g., naturally occurring allelic variants. Thus, in some cases, a suitable DQB1 polypeptide comprises the following amino acid sequence: RDSPEDFV FQFKGMCYFT NGTERVRLVT RYIYNREEYA RFDSDVGVYR AVTPQGRPDA EYWNSQKEVL EGTRAELDTV CRHNYEVAFR GILQRRVEPT VTISPSRTEA LNHHNLLVCS VTDFYPGQIK VRWFRNDQEE TAGVVSTPLI RNGDWTFQIL VMLEMTPQRG DVYTCHVEHP SLQSPITVEW (SEQ ID NO: 45), or an allelic variant thereof.

[0155] A suitable DQB1 β1 domain comprises an amino acid sequence having at least 60%, at least 70%, at least 80%, at least 90%, at least 95%, at least 98%, at least 99%, or 100%, amino acid sequence identity to the following amino acid sequence: RDSPEDFV FQFKGMCYFT NGTERVRLVT RYIYNREEYA RFDSDVGVYR AVTPQGRPDA EYWNSQKEVL EGTRAELDTV CRHNYEVAFR GILQRR (SEQ ID NO: 46); and can have a length of about 94 amino acids (e.g., 92, 93, 94, 95, or 96 amino acids). A suitable DQB1 β1 domain can comprise the following amino acid sequence: RDSPEDFV FQFKGMCYFT NGTERVRLVT RYIYNREEYA RFDSDVGVYR AVTPQGRPDA EYWNSQKEVL EGTRAELDTV CRHNYEVAFR GILQRR (SEQ ID NO: 46), or a naturally-occurring allelic variant.

[0156] A suitable DQB1 β2 domain comprises an amino acid sequence having at least 60%, at least 70%, at least 80%, at least 90%, at least 95%, at least 98%, at least 99%, or 100%, amino acid sequence identity to the following amino acid sequence: VEPT VTISPSRTEA LNHHNLLVCS VTDFYPGQIK VRWFRNDQEE TAGVVSTPLI RNGDWTFQIL VMLEMTPQRG DVYTCHVEHP SLQSPITVEW (SEQ ID NO: 47); and can have a length of about 94 amino acids (e.g., 92, 93, 94, 95, or 96 amino acids). A suitable DQB1 β2 domain can comprise the following amino acid sequence: VEPT VTISPSRTEA LNHHNLLVCS VTDFYPGQIK VRWFRNDQEE TAGVVSTPLI RNGDWTFQIL VMLEMTPQRG DVYTCHVEHP SLQSPITVEW (SEQ ID NO: 47), or a naturally-occurring allelic variant thereof.

### DQB2

[0157] In some cases, a suitable MHC Class II β chain polypeptide is a DQB2 polypeptide. A DQB2 polypeptide can have at least 60%, at least 70%, at least 80%, at least 90%, at least 95%, at least 98%, at least 99%, or 100%, amino acid sequence identity with amino acids 33-215 of the DQB2 amino acid sequence depicted in FIG. 20A or FIG. 20. In some cases, the DQB2 polypeptide has a length of about 182 amino acids (e.g., 175, 176, 177, 178, 179, 180, 181, or 182 amino acids).

[0158] A “DQB2 polypeptide” includes allelic variants, e.g., naturally occurring allelic variants. Thus, in some cases, a suitable DQB2 polypeptide comprises the following amino acid sequence: DFLVQFK GMCYFTNGTE RVRGVARYIY NREEYGRFDS DVGEFQAVTE LGRSIEDWNN YKDFLEQERA AVDKVCRHNY EAELRTTLQR QVEPTVTISP SRTEALNHHN LLVCSVTDFY PAQIKVRWFR NDQEETAGVV STSLIRNGDW TFQILVMLEI TPQRGDIYTC QVEHPSLQSP ITVEW (SEQ ID NO: 48), or an allelic variant thereof.

[0159] A suitable DQB2 β1 domain comprises an amino acid sequence having at least 60%, at least 70%, at least 80%, at least 90%, at least 95%, at least 98%, at least 99%, or 100%, amino acid sequence identity to the following amino acid sequence: DFLVQFK GMCYFTNGTE RVRGVARYIY NREEYGRFDS DVGEFQAVTE LGRSIEDWNN YKDFLEQERA AVDKVCRHNY EAELRTTLQR QVEPTV (SEQ ID NO: 49); and can have a length of about 94 amino acids (e.g., 92 93, 94, 95, 96, or 97 amino acids). A suitable DQB2 β1 domain can comprise the following amino acid sequence: DFLVQFK GMCYFTNGTE RVRGVARYIY NREEYGRFDS DVGEFQAVTE LGRSIEDWNN YKDFLEQERA AVDKVCRHNY EAELRTTLQR QVEPTV (SEQ ID NO: 49), or a naturally-occurring allelic variant.

[0160] A suitable DQB2 β2 domain comprises an amino acid sequence having at least 60%, at least 70%, at least 80%, at least 90%, at least 95%, at least 98%, at least 99%, or 100%, amino acid sequence identity to the following amino acid sequence: TISP SRTEALNHHN LLVCSVTDFY PAQIKVRWFR NDQEETAGVV STSLIRNGDW TFQILVMLEI TPQRGDIYTC QVEHPSLQSP ITVEW (SEQ ID NO: 50); and can have a length of about 94 amino acids (e.g., 92 93, 94, 95, 96, or 97 amino acids). A suitable DQB2 β2 domain can comprise the following amino acid sequence: TISP SRTEALNHHN LLVCSVTDFY PAQIKVRWFR NDQEETAGVV STSLIRNGDW TFQILVMLEI TPQRGDIYTC QVEHPSLQSP ITVEW (SEQ ID NO: 50), or a naturally-occurring allelic variant thereof.

### Disease Risk-Associated Alleles and Haplotypes

[0161] Certain alleles and haplotypes of MHC Class II have been associated with disease, e.g., increased risk of developing a particular disease. See, e.g., Erlich et al. (2008) Diabetes 57:1084; Gough and Simmonds (2007) Curr. Genomics 8:453; Mitchell et al. (2007) Robbins Basic Pathology Philadelphia: Saunders, 8^{th} ed.; Margaritte-Jeannin et al. (2004) Tissue Antigens 63:562; and Kurko et al. (2013) Clin. Rev. Allergy Immunol. 45:170.

[0162] Further information regarding HLA-autoimmune disease associations and autoantigens can be found at, e.g., the following: 1) Fernando, et al., PLoS Genetics, Volume 4 (4) e1000024 (2008); 2) Jones, et al., Nature Reviews Immunology, 6: 271-282 (2006); 3) Gough, et al., Current Genomics, 2007, 8, 453-465 (2007); 4) Autoimmunity from Bench to Bedside, Anaya et al. Eds. Center for Autoimmune Diseases Research, CREA Texts Collection, School of Medicine and Health Sciences, El Rosario University (2013); see e.g., Cruz-Tapias et al., Chapter 17 HLA Association with Autoimmune Diseases, and Chapter 8 for immunogens; 5) Zanelli, et al., Rheumatology, Volume 39, Issue 10, 1 Oct. 2000, pages 1060-1066; 6) Santos et al., Expert Opin Drug Discov; 10(3): 269-292 (2015); 7) Conghua, et al., Medicine, 97(32): e11790 (2018); 8) Fallatah et al., Autoimmune Dis. 2012; 312817 (2012); 9) Ban et al., Genes and Immunity, 5, 203-208 (2004); 10) Menconi et al., Journal of Autoimmunity, 35(1), 45-51 (2010); 11) Sinkovits et al., Front. Immunol., 9: 1646 (2018); 12) Gladman et al., J. Rheumatology, 32 (8) 1481-1487 (2005); 13) Wang et al., PlosOne 9(1), e87363 (2014); 14) Zhou, et al., Int J. Immunopathol Pharmacol., 26(3): 747-751(2013); 15) Kemp et al. Autoimmunity in vitiligo in Autoimmune Disorders-Pathogenetic Aspects, Ed. C. P. Mavragani, in InTech Press: Rijeka, Croatia (2011); 16) Simmonds et al., Am. J. Hum. Genet. 76:157-163, (2005); 17) Ma & Qiu, J. Gastroenterol, 7(5):718-721 (2001); 18) Oka et al., PLoS One, 12(10):e0187325 (2017); 19) Miller et al., Genes Immun. 16(7): 470-480 (2015); 20) Tennebo et al., Rheumatology 54:528-535 (2015); 21) Greidinger et al. J. Immunol. 180:8444-8454 (2008); 22) Hollenbach et al., J. Autoimmun 65:13-25 (2015) and references cited therein; 23) Fogdell, et al., Tissue Antigens 1995: 46: 333-336; 24) Chen et al. J. Clin Endocrinol. Metab., 84: 3182-3186 (1999); 25) Sulzer et al., Nature, 546: 656-663 (2017); 26) Somma et al., Gastroenterol Res Pract. 2013: 683824 (2013); 27) Li et al., Mol Med Rep.; 17(5): 6533-6541 (2018); 28) Bodis, et al., Rheumatol Ther., 5(1):5-20 (2018); 29) Ooi, et al., Nature; 545(7653): 243-247(2017); 30) Yamamoto et al., J. Dermatol., 38(7) 711-716 (2011); 31) Hammers & Stanley, Annu. Rev. Pathol., 11: 175-197 (2016).

[0163] HLA haplotypes and alleles associated with increased risk that an individual expressing such HLA haplotypes and/or alleles will develop a given autoimmune disease are provided in the table provided in FIG. 39. A TMAPP of the present disclosure can include any of the HLA haplotypes and/or alleles set out in the table provided in FIG. 39. The table provided in FIG. 39 also provides examples of autoantigens associated with particular autoimmune diseases. A TMAPP of the present disclosure can include a peptide epitope (e.g., a peptide epitope of from 4 amino acids to about 25 amino acids in length) of any of the autoantigens set out in the table.

[0164] The following are notes to the table provided in FIG. 39. 1) AH8.1 (HLA A1-B8-DR3-DQ2 haplotype); 2) DQ3 alleles include DQB1*03 alleles such as DQB1*03:01 to DQB1*03:05 proteins; 3) DQ5 alleles include DQB1*05 alleles such as DQB1*05:01 to DQB1*05:04 and may be associated with DQA1*01:01; 4) DR2 alleles include DRB1*15:01-15:04 and DRB1*16:01-16:06; 5) DR3 haplotypes include: DRB1*03:01, DRB1*03:02, DRB1*03:03, and DRB1*03:04; 6) DR4 haplotypes include: DRB1*04:01 through DRB1*04:13; 7) AH=ancestral haplotype; 7) Simmonds et al., Am. J. Hum. Genet. 76:157-163, (2005), see Table 1, HLAs with odds ratios greater than 1.5 include the following DRB1, DAB1 and DQA1 alleles: DRB1* −03:01 to 05, −10:01, −08:01 to 11, −16:01 to 6, −11:01 to 21, −01:01 to 04, −04:01 to 22, and −15:01 to 05; DQB1* −02, −04, −03:01, 03:04, −05, −06:01 to 09, and −03:02; and HLA-DQA1* −05:01 to 02, −06:01, −04:01, −01:01, −01:04, −01:02, −01:03, −03:11, and −03:12; 8) Li et al., Mol Med Rep.; 17(5): 6533-6541 (2018) noting epitopes from auto antigens including: SMD1 (NCBI Accession: CAE11897.1); SMD2 (NCBI Accession: AAC13776.1); SMD3 (NCBI Accession: AAA57034.1); Proliferating cell nuclear antigen (PCNA) (NCBI Accession: NP_872590.1); Acidic ribosomal phosphoprotein (P1) (NCBI Accession: AAA36471.1); Acidic ribosomal phosphoprotein (P2) (NCBI Accession: AAA36472.1); snRNP-B/B′ (NCBI Accession: P14678.2); U1-snRNP-C(NCBI Accession: NP_003084.1); U1-snRNP-A (NCBI Accession: NP_004587.1); Nucleolin (NCBI Accession: AAA59954.1); Acidic ribosomal phosphoprotein (P0) (NCBI Accession: AAA36470.1); DNA topoisomerase1 (truncated) (NCBI Accession: NP_003277.1); DNA topoisomerase 1 (full length) (NCBI Accession: NP_003277.1); and U1-SnRNP 68/70 KDa (NCBI Accession: P08621.2).

### DRB1

[0165] HLA-DR3 serotype is associated with early-age onset myasthenia gravis, Hashimoto's thyroiditis, autoimmune hepatitis, primary Sjögren's syndrome, and SLE. Certain DRB1 alleles are associated with increased risk that an individual expressing such alleles will develop a particular autoimmune disease or diseases.

### DRB1*01:01

[0166] In some cases, a TMAPP of the present disclosure comprises a DRB1*01:01 polypeptide comprising an amino acid sequence having at least 90%, at least 95%, at least 98%, at least 99%, or 100%, amino acid sequence identity to amino acids 30-227 of the DRB1*01:01 amino acid sequence provided below. In some cases, a TMAPP of the present disclosure comprises a DRB1*01:01 polypeptide comprising an amino acid sequence having at least 90%, at least 95%, at least 98%, at least 99%, or 100%, amino acid sequence identity to amino acids 30-124 of the DRB1*01:01 amino acid sequence provided below. In some cases, a TMAPP of the present disclosure comprises a DRB1*01:01 polypeptide comprising an amino acid sequence having at least 90%, at least 95%, at least 98%, at least 99%, or 100%, amino acid sequence identity to amino acids 125-227 of the DRB1*01:01 amino acid sequence provided below.

DRB1*01:01:
(SEQ ID NO: 51)
MVCLKLPGGSCMTALTVTLMVLSSPLALAGDTRPRFLWQLKFECHFFNG
TERVRLLERCIYNQEESVRFDSDVGEYRAVTELGRPDAEYWNSQKDLLE
QRRAAVDTYCRHNYGVGESFTVQRRVEPKVTVYPSKTQPLQHHNLLVCS
VSGFYPGSIEVRWFRNGQEEKAGVVSTGLIQNGDWTFQTLVMLETVPRS
GEVYTCQVEHPSVTSPLTVEWRARSESAQSKMLSGVGGFVLGLLFLGAG
LFIYFRNQKGHSGLQPTGFLS.

### DRB1*01:02

[0167] In some cases, a TMAPP of the present disclosure comprises a DRB1*01:02 polypeptide comprising an amino acid sequence having at least 90%, at least 95%, at least 98%, at least 99%, or 100%, amino acid sequence identity to amino acids 30-227 of the DRB1*01:02 amino acid sequence provided below. In some cases, a TMAPP of the present disclosure comprises a DRB1*01:02 polypeptide comprising an amino acid sequence having at least 90%, at least 95%, at least 98%, at least 99%, or 100%, amino acid sequence identity to amino acids 30-124 of the DRB1*01:02 amino acid sequence provided below. In some cases, a TMAPP of the present disclosure comprises a DRB1*01:02 polypeptide comprising an amino acid sequence having at least 90%, at least 95%, at least 98%, at least 99%, or 100%, amino acid sequence identity to amino acids 125-227 of the DRB1*01:02 amino acid sequence provided below.

DRB1*01:02:
(SEQ ID NO: 52)
[sequence omitted]

### DRB1*01:03

[0168] In some cases, a TMAPP of the present disclosure comprises a DRB1*01:03 polypeptide comprising an amino acid sequence having at least 90%, at least 95%, at least 98%, at least 99%, or 100%, amino acid sequence identity to amino acids 30-227 of the DRB1*01:03 amino acid sequence provided below. In some cases, a TMAPP of the present disclosure comprises a DRB1*01:03 polypeptide comprising an amino acid sequence having at least 90%, at least 95%, at least 98%, at least 99%, or 100%, amino acid sequence identity to amino acids 30-124 of the DRB1*01:03 amino acid sequence provided below. In some cases, a TMAPP of the present disclosure comprises a DRB1*01:03 polypeptide comprising an amino acid sequence having at least 90%, at least 95%, at least 98%, at least 99%, or 100%, amino acid sequence identity to amino acids 125-227 of the DRB1*01:03 amino acid sequence provided below.

DRB1*01:03:
(SEQ ID NO: 55)
[sequence omitted]

### DRB1*03:01

[0169] DRB1*0301 (“DRB1*03:01” in FIG. 7) is associated with increased risk of developing early onset Grave's disease and/or type 1 autoimmune hepatitis. Thus, in some cases, a TMAPP of the present disclosure comprises a DRB1*03:01 polypeptide comprising an amino acid sequence having at least 90%, at least 95%, at least 98%, at least 99%, or 100%, amino acid sequence identity to amino acids 30-227 of the DRB1*03:01 amino acid sequence depicted in FIG. 7. In some cases, a TMAPP of the present disclosure comprises a DRB1*03:01 polypeptide comprising an amino acid sequence having at least 90%, at least 95%, at least 98%, at least 99%, or 100%, amino acid sequence identity to amino acids 30-124 of the DRB1*03:01 amino acid sequence depicted in FIG. 7. In some cases, a TMAPP of the present disclosure comprises a DRB1*03:01 polypeptide comprising an amino acid sequence having at least 90%, at least 95%, at least 98%, at least 99%, or 100%, amino acid sequence identity to amino acids 125-227 of the DRB1*03:01 amino acid sequence depicted in FIG. 7.

### DRB1*03:02

[0170] In some cases, a TMAPP of the present disclosure comprises a DRB1*03:02 polypeptide comprising an amino acid sequence having at least 90%, at least 95%, at least 98%, at least 99%, or 100%, amino acid sequence identity to amino acids 30-227 of the DRB1*03:02 amino acid sequence provided below. In some cases, a TMAPP of the present disclosure comprises a DRB1*03:02 polypeptide comprising an amino acid sequence having at least 90%, at least 95%, at least 98%, at least 99%, or 100%, amino acid sequence identity to amino acids 30-124 of the DRB1*03:02 amino acid sequence provided below. In some cases, a TMAPP of the present disclosure comprises a DRB1*03:02 polypeptide comprising an amino acid sequence having at least 90%, at least 95%, at least 98%, at least 99%, or 100%, amino acid sequence identity to amino acids 125-227 of the DRB1*03:02 amino acid sequence provided below.

DRB1*03:02:
(SEQ ID NO: 56)
[sequence omitted]

### DRB1*0304

[0171] DRB1*0304 is associated with Grave's disease. Thus, in some cases, a TMAPP of the present disclosure comprises a DRB1*03:04 polypeptide comprising an amino acid sequence having at least 90%, at least 95%, at least 98%, at least 99%, or 100%, amino acid sequence identity to amino acids 30-227 of the DRB1*03:04 amino acid sequence provided below. In some cases, a TMAPP of the present disclosure comprises a DRB1*03:04 polypeptide comprising an amino acid sequence having at least 90%, at least 95%, at least 98%, at least 99%, or 100%, amino acid sequence identity to amino acids 30-124 of the DRB1*03:04 amino acid sequence provided below. In some cases, a TMAPP of the present disclosure comprises a DRB1*03:04 polypeptide comprising an amino acid sequence having at least 90%, at least 95%, at least 98%, at least 99%, or 100%, amino acid sequence identity to amino acids 125-227 of the DRB1*03:04 amino acid sequence provided below.

DRB1*0304:
(SEQ ID NO: 57)
[sequence omitted]

### DRB1*04:01

[0172] DRB1*04:01 is associated with increased risk of developing multiple sclerosis and/or rheumatoid arthritis. Thus, in some cases, a TMAPP of the present disclosure comprises a DRB1*04:01 polypeptide comprising an amino acid sequence having at least 90%, at least 95%, at least 98%, at least 99%, or 100%, amino acid sequence identity to amino acids 30-227 of the DRB1*04:01 amino acid sequence depicted in FIG. 7. In some cases, a TMAPP of the present disclosure comprises a DRB1*04:01 polypeptide comprising an amino acid sequence having at least 90%, at least 95%, at least 98%, at least 99%, or 100%, amino acid sequence identity to amino acids 30-124 of the DRB1*04:01 amino acid sequence depicted in FIG. 7. In some cases, a TMAPP of the present disclosure comprises a DRB1*04:01 polypeptide comprising an amino acid sequence having at least 90%, at least 95%, at least 98%, at least 99%, or 100%, amino acid sequence identity to amino acids 125-227 of the DRB1*04:01 amino acid sequence depicted in FIG. 7.

### DRB1*04:02

[0173] DRB1*04:02 is associated with increased risk of developing idiopathic pemphigus vulgaris, and/or SLE (e.g., SLE-associated anti-cardiolipin; SLE-associated anti-β2 glycoprotein I). Thus, in some cases, a TMAPP of the present disclosure comprises a DRB1*04:02 polypeptide comprising an amino acid sequence having at least 90%, at least 95%, at least 98%, at least 99%, or 100%, amino acid sequence identity to amino acids 30-227 of the DRB1*04:02 amino acid sequence provided below. In some cases, a TMAPP of the present disclosure comprises a DRB1*04:02 polypeptide comprising an amino acid sequence having at least 90%, at least 95%, at least 98%, at least 99%, or 100%, amino acid sequence identity to amino acids 30-124 of the DRB1*04:02 amino acid sequence provided below. In some cases, a TMAPP of the present disclosure comprises a DRB1*04:02 polypeptide comprising an amino acid sequence having at least 90%, at least 95%, at least 98%, at least 99%, or 100%, amino acid sequence identity to amino acids 125-227 of the DRB1*04:02 amino acid sequence provided below.

DRB1*04:02:
(SEQ ID NO: 53)
[sequence omitted]

### DRB1*04:03

[0174] DRB1*0403 is associated with increased risk of developing SLE (e.g., increased risk of developing SLE-associated anti-cardiolipin antibodies and/or SLE-associated anti-β2 glycoprotein I antibodies). Thus, in some cases, a TMAPP of the present disclosure comprises a DRB1*04:03 polypeptide comprising an amino acid sequence having at least 90%, at least 95%, at least 98%, at least 99%, or 100%, amino acid sequence identity to amino acids 30 to 227 of the DRB1*04:03 amino acid sequence provided below. In some cases, a TMAPP of the present disclosure comprises a DRB1*04:03 polypeptide comprising an amino acid sequence having at least 90%, at least 95%, at least 98%, at least 99%, or 100%, amino acid sequence identity to amino acids 30-124 of the DRB1*04:03 amino acid sequence provided below. In some cases, a TMAPP of the present disclosure comprises a DRB1*04:03 polypeptide comprising an amino acid sequence having at least 90%, at least 95%, at least 98%, at least 99%, or 100%, amino acid sequence identity to amino acids 125-227 of the DRB1*04:03 amino acid sequence provided below.

DRB1*04:03:
(SEQ ID NO: 415)
MVCLKFPGGSCMAALTVTLMVLSSPLALAGDTRPRFLEQVKHECHFFNG
TERVRFLDRYFYHQEEYVRFDSDVGEYRAVTELGRPDAEYWNSQKDLLE
QRRAEVDTYCRHNYGVVESFTVQRRVYPEVTVYPAKTQPLQHHNLLVCS
VNGFYPGSIEVRWFRNGQEEKTGVVSTGLIQNGDWTFQTLVMLETVPRS
GEVYTCQVEHPSLTSPLTVEWRARSESAQSKMLSGVGGFVLGLLFLGAG
LFIYFRNQKGHSGLQPTGFLS

### DRB1*04:04

[0175] DRB1*04:04 is associated with increased risk of developing rheumatoid arthritis (e.g., increased risk of developing high titers of circulating anti-cyclic citrullinated peptide antibodies) and/or autoimmune hepatitis. Thus, in some cases, a TMAPP of the present disclosure comprises a DRB1*04:04 polypeptide comprising an amino acid sequence having at least 90%, at least 95%, at least 98%, at least 99%, or 100%, amino acid sequence identity to amino acids 30-227 of the DRB1*04:04 amino acid sequence provided below. In some cases, a TMAPP of the present disclosure comprises a DRB1*04:04 polypeptide comprising an amino acid sequence having at least 90%, at least 95%, at least 98%, at least 99%, or 100%, amino acid sequence identity to amino acids 30-124 of the DRB1*04:04 amino acid sequence provided below. In some cases, a TMAPP of the present disclosure comprises a DRB1*04:04 polypeptide comprising an amino acid sequence having at least 90%, at least 95%, at least 98%, at least 99%, or 100%, amino acid sequence identity to amino acids 125-227 of the DRB1*04:04 amino acid sequence provided below.

(SEQ ID NO: 416)
[sequence omitted]

### DRB1*04:05

[0176] DRB1*04:05 is associated with increased risk of developing rheumatoid arthritis and/or autoimmune hepatitis. Thus, in some cases, a TMAPP of the present disclosure comprises a DRB1*04:05 polypeptide comprising an amino acid sequence having at least 90%, at least 95%, at least 98%, at least 99%, or 100%, amino acid sequence identity to amino acids 30-227 of the DRB1*04:05 amino acid sequence provided below. In some cases, a TMAPP of the present disclosure comprises a DRB1*04:05 polypeptide comprising an amino acid sequence having at least 90%, at least 95%, at least 98%, at least 99%, or 100%, amino acid sequence identity to amino acids 30-124 of the DRB1*04:05 amino acid sequence provided below. In some cases, a TMAPP of the present disclosure comprises a DRB1*04:05 polypeptide comprising an amino acid sequence having at least 90%, at least 95%, at least 98%, at least 99%, or 100%, amino acid sequence identity to amino acids 125-227 of the DRB1*04:05 amino acid sequence provided below.

DRB1*04:05:
(SEQ ID NO: 54)
[sequence omitted]

### DRB1*04:06

[0177] DRB1*04:06 is associated with increased risk of developing anti-caspase-8 autoantibodies (e.g., in silicosis-systemic sclerosis (SSc)-systemic lupus erythematosus (SLE). Thus, in some cases, a TMAPP of the present disclosure comprises a DRB1*04:06 polypeptide comprising an amino acid sequence having at least 90%, at least 95%, at least 98%, at least 99%, or 100%, amino acid sequence identity to amino acids 30-227 of the DRB1*04:06 amino acid sequence provided below. In some cases, a TMAPP of the present disclosure comprises a DRB1*04:06 polypeptide comprising an amino acid sequence having at least 90%, at least 95%, at least 98%, at least 99%, or 100%, amino acid sequence identity to amino acids 30-124 of the DRB1*04:06 amino acid sequence provided below. In some cases, a TMAPP of the present disclosure comprises a DRB1*04:06 polypeptide comprising an amino acid sequence having at least 90%, at least 95%, at least 98%, at least 99%, or 100%, amino acid sequence identity to amino acids 125-227 of the DRB1*04:06 amino acid sequence provided below.

DRB1*04:06
(SEQ ID NO: 58)
[sequence omitted]

### DRB1*04:08

[0178] In some cases, a TMAPP of the present disclosure comprises a DRB1*04:08 polypeptide comprising an amino acid sequence having at least 90%, at least 95%, at least 98%, at least 99%, or 100%, amino acid sequence identity to amino acids 30-227 of the DRB1*04:08 amino acid sequence provided below. In some cases, a TMAPP of the present disclosure comprises a DRB1*04:08 polypeptide comprising an amino acid sequence having at least 90%, at least 95%, at least 98%, at least 99%, or 100%, amino acid sequence identity to amino acids 30-124 of the DRB1*04:08 amino acid sequence provided below. In some cases, a TMAPP of the present disclosure comprises a DRB1*04:08 polypeptide comprising an amino acid sequence having at least 90%, at least 95%, at least 98%, at least 99%, or 100%, amino acid sequence identity to amino acids 125-227 of the DRB1*04:08 amino acid sequence provided below.

DRB1*04:08:
(SEQ ID NO: 72)
[sequence omitted]

### DRB1*08:01

[0179] In some cases, a TMAPP of the present disclosure comprises a DRB1*08:01 polypeptide comprising an amino acid sequence having at least 90%, at least 95%, at least 98%, at least 99%, or 100%, amino acid sequence identity to amino acids 30-227 of the DRB1*08:01 amino acid sequence provided below. In some cases, a TMAPP of the present disclosure comprises a DRB1*08:01 polypeptide comprising an amino acid sequence having at least 90%, at least 95%, at least 98%, at least 99%, or 100%, amino acid sequence identity to amino acids 30-124 of the DRB1*08:01 amino acid sequence provided below. In some cases, a TMAPP of the present disclosure comprises a DRB1*08:01 polypeptide comprising an amino acid sequence having at least 90%, at least 95%, at least 98%, at least 99%, or 100%, amino acid sequence identity to amino acids 125-227 of the DRB1*08:01 amino acid sequence provided below.

DRB1*08:01:
(SEQ ID NO: 73)
[sequence omitted]

### DRB1*08:02

[0180] In some cases, a TMAPP of the present disclosure comprises a DRB1*08:02 polypeptide comprising an amino acid sequence having at least 90%, at least 95%, at least 98%, at least 99%, or 100%, amino acid sequence identity to amino acids 30-227 of the DRB1*08:02 amino acid sequence provided below. In some cases, a TMAPP of the present disclosure comprises a DRB1*08:02 polypeptide comprising an amino acid sequence having at least 90%, at least 95%, at least 98%, at least 99%, or 100%, amino acid sequence identity to amino acids 30-124 of the DRB1*08:02 amino acid sequence provided below. In some cases, a TMAPP of the present disclosure comprises a DRB1*08:02 polypeptide comprising an amino acid sequence having at least 90%, at least 95%, at least 98%, at least 99%, or 100%, amino acid sequence identity to amino acids 125-227 of the DRB1*08:02 amino acid sequence provided below.

DRB1*08:02:
(SEQ ID NO: 74)
[sequence omitted]

### DRB1*08:03

[0181] In some cases, a TMAPP of the present disclosure comprises a DRB1*08:03 polypeptide comprising an amino acid sequence having at least 90%, at least 95%, at least 98%, at least 99%, or 100%, amino acid sequence identity to amino acids 30-227 of the DRB1*08:03 amino acid sequence provided below. In some cases, a TMAPP of the present disclosure comprises a DRB1*08:03 polypeptide comprising an amino acid sequence having at least 90%, at least 95%, at least 98%, at least 99%, or 100%, amino acid sequence identity to amino acids 30-124 of the DRB1*08:03 amino acid sequence provided below. In some cases, a TMAPP of the present disclosure comprises a DRB1*08:03 polypeptide comprising an amino acid sequence having at least 90%, at least 95%, at least 98%, at least 99%, or 100%, amino acid sequence identity to amino acids 125-227 of the DRB1*08:03 amino acid sequence provided below.

DRB1*08:03:
(SEQ ID NO: 75)
[sequence omitted]

### DRB1*09:01

[0182] In some cases, a TMAPP of the present disclosure comprises a DRB1*09:01 polypeptide comprising an amino acid sequence having at least 90%, at least 95%, at least 98%, at least 99%, or 100%, amino acid sequence identity to amino acids 30-227 of the DRB1*09:01 amino acid sequence provided below. In some cases, a TMAPP of the present disclosure comprises a DRB1*09:01 polypeptide comprising an amino acid sequence having at least 90%, at least 95%, at least 98%, at least 99%, or 100%, amino acid sequence identity to amino acids 30-124 of the DRB1*09:01 amino acid sequence provided below. In some cases, a TMAPP of the present disclosure comprises a DRB1*09:01 polypeptide comprising an amino acid sequence having at least 90%, at least 95%, at least 98%, at least 99%, or 100%, amino acid sequence identity to amino acids 125-227 of the DRB1*09:01 amino acid sequence provided below.

DRB1*09:01:
(SEQ ID NO: 76)
[sequence omitted]

### DRB1*10:01

[0183] In some cases, a TMAPP of the present disclosure comprises a DRB1*10:01 polypeptide comprising an amino acid sequence having at least 90%, at least 95%, at least 98%, at least 99%, or 100%, amino acid sequence identity to amino acids 30-227 of the DRB1*10:01 amino acid sequence provided below. In some cases, a TMAPP of the present disclosure comprises a DRB1*10:01 polypeptide comprising an amino acid sequence having at least 90%, at least 95%, at least 98%, at least 99%, or 100%, amino acid sequence identity to amino acids 30-124 of the DRB1*10:01 amino acid sequence provided below. In some cases, a TMAPP of the present disclosure comprises a DRB1*10:01 polypeptide comprising an amino acid sequence having at least 90%, at least 95%, at least 98%, at least 99%, or 100%, amino acid sequence identity to amino acids 125-227 of the DRB1*10:01 amino acid sequence provided below.

DRB1*10:01:
(SEQ ID NO: 77)
[sequence omitted]

### DRB1*11:01

[0184] In some cases, a TMAPP of the present disclosure comprises a DRB1*11:01 polypeptide comprising an amino acid sequence having at least 90%, at least 95%, at least 98%, at least 99%, or 100%, amino acid sequence identity to amino acids 30-227 of the DRB1*11:01 amino acid sequence provided below. In some cases, a TMAPP of the present disclosure comprises a DRB1*11:01 polypeptide comprising an amino acid sequence having at least 90%, at least 95%, at least 98%, at least 99%, or 100%, amino acid sequence identity to amino acids 30-124 of the DRB1*11:01 amino acid sequence provided below. In some cases, a TMAPP of the present disclosure comprises a DRB1*11:01 polypeptide comprising an amino acid sequence having at least 90%, at least 95%, at least 98%, at least 99%, or 100%, amino acid sequence identity to amino acids 125-227 of the DRB1*11:01 amino acid sequence provided below.

DRB1*11:01:
(SEQ ID NO: 78)
[sequence omitted]

### DRB1*11:03

[0185] In some cases, a TMAPP of the present disclosure comprises a DRB1*11:03 polypeptide comprising an amino acid sequence having at least 90%, at least 95%, at least 98%, at least 99%, or 100%, amino acid sequence identity to amino acids 30-227 of the DRB1*11:03 amino acid sequence provided below. In some cases, a TMAPP of the present disclosure comprises a DRB1*11:03 polypeptide comprising an amino acid sequence having at least 90%, at least 95%, at least 98%, at least 99%, or 100%, amino acid sequence identity to amino acids 30-124 of the DRB1*11:03 amino acid sequence provided below. In some cases, a TMAPP of the present disclosure comprises a DRB1*11:03 polypeptide comprising an amino acid sequence having at least 90%, at least 95%, at least 98%, at least 99%, or 100%, amino acid sequence identity to amino acids 125-227 of the DRB1*11:03 amino acid sequence provided below.

DRB1*11:03:
(SEQ ID NO: 79)
MVCLRLPGGSCMAVLTVTLMVLSSPLALAGDTRPRFLEYSTSECHFFNG
TERVRFLDRYFYNQEEYVRFDSDVGEFRAVTELGRPDEEYWNSQKDFLE
DERAAVDTYCRHNYGVVESFTVQRRVHPKVTVYPSKTQPLQHHNLLVCS
VSGFYPGSIEVRWFRNGQEEKTGVVSTGLIHNGDWTFQTLVMLETVPRS
GEVYTCQVEHPSVTSPLTVEWRARSESAQSKMLSGVGGFVLGLLFLGAG
LFIYFRNQKGHSGLQPRGFLS.

### DRB1*11:04

[0186] In some cases, a TMAPP of the present disclosure comprises a DRB1*11:04 polypeptide comprising an amino acid sequence having at least 90%, at least 95%, at least 98%, at least 99%, or 100%, amino acid sequence identity to amino acids 30-227 of the DRB1*11:04 amino acid sequence provided below. In some cases, a TMAPP of the present disclosure comprises a DRB1*11:04 polypeptide comprising an amino acid sequence having at least 90%, at least 95%, at least 98%, at least 99%, or 100%, amino acid sequence identity to amino acids 30-124 of the DRB1*11:04 amino acid sequence provided below. In some cases, a TMAPP of the present disclosure comprises a DRB1*11:04 polypeptide comprising an amino acid sequence having at least 90%, at least 95%, at least 98%, at least 99%, or 100%, amino acid sequence identity to amino acids 125-227 of the DRB1*11:04 amino acid sequence provided below.

DRB1*11:04:
(SEQ ID NO: 80)
[sequence omitted]

### DRB1*13:01

[0187] In some cases, a TMAPP of the present disclosure comprises a DRB1*13:01 polypeptide comprising an amino acid sequence having at least 90%, at least 95%, at least 98%, at least 99%, or 100%, amino acid sequence identity to amino acids 30-227 of the DRB1*13:01 amino acid sequence provided below. In some cases, a TMAPP of the present disclosure comprises a DRB1*13:01 polypeptide comprising an amino acid sequence having at least 90%, at least 95%, at least 98%, at least 99%, or 100%, amino acid sequence identity to amino acids 30-124 of the DRB1*13:01 amino acid sequence provided below. In some cases, a TMAPP of the present disclosure comprises a DRB1*13:01 polypeptide comprising an amino acid sequence having at least 90%, at least 95%, at least 98%, at least 99%, or 100%, amino acid sequence identity to amino acids 125-227 of the DRB1*13:01 amino acid sequence provided below.

DRB1*13:01:
(SEQ ID NO: 81)
[sequence omitted]

### DRB1*13:03

[0188] In some cases, a TMAPP of the present disclosure comprises a DRB1*13:03 polypeptide comprising an amino acid sequence having at least 90%, at least 95%, at least 98%, at least 99%, or 100%, amino acid sequence identity to amino acids 30-227 of the DRB1*13:03 amino acid sequence provided below. In some cases, a TMAPP of the present disclosure comprises a DRB1*13:03 polypeptide comprising an amino acid sequence having at least 90%, at least 95%, at least 98%, at least 99%, or 100%, amino acid sequence identity to amino acids 30-124 of the DRB1*13:03 amino acid sequence provided below. In some cases, a TMAPP of the present disclosure comprises a DRB1*13:03 polypeptide comprising an amino acid sequence having at least 90%, at least 95%, at least 98%, at least 99%, or 100%, amino acid sequence identity to amino acids 125-227 of the DRB1*13:031 amino acid sequence provided below.

DRB1*13:03:
(SEQ ID NO: 82)
[sequence omitted]

### DRB1*14:01

[0189] In some cases, a TMAPP of the present disclosure comprises a DRB1*14:01 polypeptide comprising an amino acid sequence having at least 90%, at least 95%, at least 98%, at least 99%, or 100%, amino acid sequence identity to amino acids 30-227 of the DRB1*14:01 amino acid sequence provided below. In some cases, a TMAPP of the present disclosure comprises a DRB1*14:01 polypeptide comprising an amino acid sequence having at least 90%, at least 95%, at least 98%, at least 99%, or 100%, amino acid sequence identity to amino acids 30-124 of the DRB1*14:01 amino acid sequence provided below. In some cases, a TMAPP of the present disclosure comprises a DRB1*14:01 polypeptide comprising an amino acid sequence having at least 90%, at least 95%, at least 98%, at least 99%, or 100%, amino acid sequence identity to amino acids 125-227 of the DRB1*14:01 amino acid sequence provided below.

DRB1*14:01:
(SEQ ID NO: 83)
[sequence omitted]

### DRB1*14:02

[0190] In some cases, a TMAPP of the present disclosure comprises a DRB1*14:02 polypeptide comprising an amino acid sequence having at least 90%, at least 95%, at least 98%, at least 99%, or 100%, amino acid sequence identity to amino acids 30-227 of the DRB1*14:02 amino acid sequence provided below. In some cases, a TMAPP of the present disclosure comprises a DRB1*14:02 polypeptide comprising an amino acid sequence having at least 90%, at least 95%, at least 98%, at least 99%, or 100%, amino acid sequence identity to amino acids 30-124 of the DRB1*14:02 amino acid sequence provided below. In some cases, a TMAPP of the present disclosure comprises a DRB1*14:02 polypeptide comprising an amino acid sequence having at least 90%, at least 95%, at least 98%, at least 99%, or 100%, amino acid sequence identity to amino acids 125-227 of the DRB1*14:02 amino acid sequence provided below.

DRB1*14:02:
(SEQ ID NO: 84)
[sequence omitted]

### DRB1*14:05

[0191] In some cases, a TMAPP of the present disclosure comprises a DRB1*14:05 polypeptide comprising an amino acid sequence having at least 90%, at least 95%, at least 98%, at least 99%, or 100%, amino acid sequence identity to amino acids 30-227 of the DRB1*14:05 amino acid sequence provided below. In some cases, a TMAPP of the present disclosure comprises a DRB1*14:05 polypeptide comprising an amino acid sequence having at least 90%, at least 95%, at least 98%, at least 99%, or 100%, amino acid sequence identity to amino acids 30-124 of the DRB1*14:05 amino acid sequence provided below. In some cases, a TMAPP of the present disclosure comprises a DRB1*14:05 polypeptide comprising an amino acid sequence having at least 90%, at least 95%, at least 98%, at least 99%, or 100%, amino acid sequence identity to amino acids 125-227 of the DRB1*14:05 amino acid sequence provided below.

DRB1*14:05:
(SEQ ID NO: 85)
[sequence omitted]

### DRB1*14:06

[0192] DRB1*14:06:

[0193] In some cases, a TMAPP of the present disclosure comprises a DRB1*14:06 polypeptide comprising an amino acid sequence having at least 90%, at least 95%, at least 98%, at least 99%, or 100%, amino acid sequence identity to amino acids 30-227 of the DRB1*14:06 amino acid sequence provided below. In some cases, a TMAPP of the present disclosure comprises a DRB1*14:06 polypeptide comprising an amino acid sequence having at least 90%, at least 95%, at least 98%, at least 99%, or 100%, amino acid sequence identity to amino acids 30-124 of the DRB1*14:06 amino acid sequence provided below. In some cases, a TMAPP of the present disclosure comprises a DRB1*14:06 polypeptide comprising an amino acid sequence having at least 90%, at least 95%, at least 98%, at least 99%, or 100%, amino acid sequence identity to amino acids 125-227 of the DRB1*14:06 amino acid sequence provided below.

(SEQ ID NO: 86)
[sequence omitted]

### DRB1*1501, DRB1*1502, and DRB1*1503

[0194] DR2 serotypes are associated with increased risk of SLE and/or MS. HLA alleles associated with increased risk of SLE and/or MS include DRB1*1501, DRB1*1502, and DRB1*1503.

[0195] Thus, in some cases, a TMAPP of the present disclosure comprises a DRB1*1501 polypeptide comprising an amino acid sequence having at least 90%, at least 95%, at least 98%, at least 99%, or 100%, amino acid sequence identity to amino acids 30-227 of the DRB1*1501 amino acid sequence depicted in FIG. 7. In some cases, a TMAPP of the present disclosure comprises a DRB1*1501 polypeptide comprising an amino acid sequence having at least 90%, at least 95%, at least 98%, at least 99%, or 100%, amino acid sequence identity to amino acids 30-124 of the DRB1*1501 amino acid sequence depicted in FIG. 7. In some cases, a TMAPP of the present disclosure comprises a DRB1*1501 polypeptide comprising an amino acid sequence having at least 90%, at least 95%, at least 98%, at least 99%, or 100%, amino acid sequence identity to amino acids 125-227 of the DRB1*1501 amino acid sequence depicted in FIG. 7.

[0196] In some cases, a TMAPP of the present disclosure comprises a DRB1*1502 polypeptide comprising an amino acid sequence having at least 90%, at least 95%, at least 98%, at least 99%, or 100%, amino acid sequence identity to amino acids 30-227 of the DRB1*1502 amino acid sequence provided below. In some cases, a TMAPP of the present disclosure comprises a DRB1*1502 polypeptide comprising an amino acid sequence having at least 90%, at least 95%, at least 98%, at least 99%, or 100%, amino acid sequence identity to amino acids 30-124 of the DRB1*1502 amino acid sequence provided below. In some cases, a TMAPP of the present disclosure comprises a DRB1*1502 polypeptide comprising an amino acid sequence having at least 90%, at least 95%, at least 98%, at least 99%, or 100%, amino acid sequence identity to amino acids 125-227 of the DRB1*1502 amino acid sequence provided below.

DRB1*1502:
(SEQ ID NO: 87)
[sequence omitted]

[0197] In some cases, a TMAPP of the present disclosure comprises a DRB1*1503 polypeptide comprising an amino acid sequence having at least 90%, at least 95%, at least 98%, at least 99%, or 100%, amino acid sequence identity to amino acids 30-227 of the DRB1*1503 amino acid sequence provided below. In some cases, a TMAPP of the present disclosure comprises a DRB1*1503 polypeptide comprising an amino acid sequence having at least 90%, at least 95%, at least 98%, at least 99%, or 100%, amino acid sequence identity to amino acids 30-124 of the DRB1*1503 amino acid sequence provided below. In some cases, a TMAPP of the present disclosure comprises a DRB1*1503 polypeptide comprising an amino acid sequence having at least 90%, at least 95%, at least 98%, at least 99%, or 100%, amino acid sequence identity to amino acids 125-227 of the DRB1*1503 amino acid sequence provided below.

DRB1*1503:
(SEQ ID NO: 88)
[sequence omitted]

### DRB1*15:04

[0198] In some cases, a TMAPP of the present disclosure comprises a DRB1*1504 polypeptide comprising an amino acid sequence having at least 90%, at least 95%, at least 98%, at least 99%, or 100%, amino acid sequence identity to amino acids 30-227 of the DRB1*1504 amino acid sequence provided below. In some cases, a TMAPP of the present disclosure comprises a DRB1*1504 polypeptide comprising an amino acid sequence having at least 90%, at least 95%, at least 98%, at least 99%, or 100%, amino acid sequence identity to amino acids 30-124 of the DRB1*1504 amino acid sequence provided below. In some cases, a TMAPP of the present disclosure comprises a DRB1*1504 polypeptide comprising an amino acid sequence having at least 90%, at least 95%, at least 98%, at least 99%, or 100%, amino acid sequence identity to amino acids 125-227 of the DRB1*1504 amino acid sequence provided below.

DRB1*15:04:
(SEQ ID NO: 89)
[sequence omitted]

### DRB1*15:05

[0199] In some cases, a TMAPP of the present disclosure comprises a DRB1*15:05 polypeptide comprising an amino acid sequence having at least 90%, at least 95%, at least 98%, at least 99%, or 100%, amino acid sequence identity to amino acids 30-227 of the DRB1*15:05 amino acid sequence provided below. In some cases, a TMAPP of the present disclosure comprises a DRB1*15:05 polypeptide comprising an amino acid sequence having at least 90%, at least 95%, at least 98%, at least 99%, or 100%, amino acid sequence identity to amino acids 30-227 of the DRB1*15:05 amino acid sequence provided below. In some cases, a TMAPP of the present disclosure comprises a DRB1*15:05 polypeptide comprising an amino acid sequence having at least 90%, at least 95%, at least 98%, at least 99%, or 100%, amino acid sequence identity to amino acids 125-227 of the DRB1*15:05 amino acid sequence provided below.

DRB1*15:05:
(SEQ ID NO: 90)
MVCLKLPGGS CMTALTVTLM VLSSPLALSG DTRPRFLWQP
KRECHFFNGT ERVRFLDRYF YNQEESVRFD SDVGEFRAVT
ELGRPDAEYW NSQKDILEQA RAAVDTYCRH NYGVVESFTV
QRRVQPKVTV YPSKTQPLQH HNLLVCSVSG FYPGSIEVRW
FLNGQEEKAG MVSTGLIQNG DWTFQTLVML ETVPRSGEVY
TCQVEHPSVT SPLTVEWRAR SESAQSKMLS GVGGFVLGLL
FLGAGLFIYF RNQKGHSGLQ PTGFLS.

### DRB1*15:06

[0200] In some cases, a TMAPP of the present disclosure comprises a DRB1*15:06 polypeptide comprising an amino acid sequence having at least 90%, at least 95%, at least 98%, at least 99%, or 100%, amino acid sequence identity to amino acids 30-227 of the DRB1*15:06 amino acid sequence provided below. In some cases, a TMAPP of the present disclosure comprises a DRB1*15:06 polypeptide comprising an amino acid sequence having at least 90%, at least 95%, at least 98%, at least 99%, or 100%, amino acid sequence identity to amino acids 30-124 of the DRB1*15:06 amino acid sequence provided below. In some cases, a TMAPP of the present disclosure comprises a DRB1*15:06 polypeptide comprising an amino acid sequence having at least 90%, at least 95%, at least 98%, at least 99%, or 100%, amino acid sequence identity to amino acids 125-227 of the DRB1*15:06 amino acid sequence provided below.

DRB1*15:06:
(SEQ ID NO: 90)
MVCLKLPGGS CMTALTVTLM VLSSPLALSG DTRPRFLWQP
KRECHFFNGT ERVRFLDRYF YNQEESVRFD SDVGEFRAVT
ELGRPDAEYW NSQKDILEQA RAAVDTYCRH NYGVVESFTV
QRRVQPKVTV YPSKTQPLQH HNLLVCSVSG FYPGSIEVRW
FLNGQEEKAG MVSTGLIQNG DWTFQTLVML ETVPRSGEVY
TCQVEHPSVT SPLTVEWRAR SESAQSKMLS GVGGFVLGLL
FLGAGLFIYF RNQKGHSGLQ PTGFLS.

### DRB1*15:07

[0201] In some cases, a TMAPP of the present disclosure comprises a DRB1*15:07 polypeptide comprising an amino acid sequence having at least 90%, at least 95%, at least 98%, at least 99%, or 100%, amino acid sequence identity to amino acids 30-227 of the DRB1*15:07 amino acid sequence provided below. In some cases, a TMAPP of the present disclosure comprises a DRB1*15:07 polypeptide comprising an amino acid sequence having at least 90%, at least 95%, at least 98%, at least 99%, or 100%, amino acid sequence identity to amino acids 30-124 of the DRB1*15:07 amino acid sequence provided below. In some cases, a TMAPP of the present disclosure comprises a DRB1*15:07 polypeptide comprising an amino acid sequence having at least 90%, at least 95%, at least 98%, at least 99%, or 100%, amino acid sequence identity to amino acids 125-227 of the DRB1*15:07 amino acid sequence provided below.

DRB1*15:07:
(SEQ ID NO: 91)
[sequence omitted]

### DRB3

[0202] In some cases, a TMAPP of the present disclosure comprises an MHC Class II β chain polypeptide of a DRB3 allele.

### DRB3*01:01

[0203] In some cases, a TMAPP of the present disclosure comprises a DRB3*01:01 polypeptide comprising an amino acid sequence having at least 90%, at least 95%, at least 98%, at least 99%, or 100%, amino acid sequence identity to amino acids 30-227 of the DRB3*01:01 amino acid sequence provided below. In some cases, a TMAPP of the present disclosure comprises a DRB3*01:01 polypeptide comprising an amino acid sequence having at least 90%, at least 95%, at least 98%, at least 99%, or 100%, amino acid sequence identity to amino acids 30-124 of the DRB3*01:01 amino acid sequence provided below. In some cases, a TMAPP of the present disclosure comprises a DRB3*01:01 polypeptide comprising an amino acid sequence having at least 90%, at least 95%, at least 98%, at least 99%, or 100%, amino acid sequence identity to amino acids 125-227 of the DRB3*01:01 amino acid sequence provided below.

DRB3*01:01
(SEQ ID NO: 92)
MVCLKLPGGSSLAALTVTLMVLSSRLAFAGDTRPRFLELRKSECHFFNGT
ERVRYLDRYFHNQEEFLRFDSDVGEYRAVTELGRPVAESWNSQKDLLEQK
RGRVDNYCRHNYGVGESFTVQRRVHPQVTVYPAKTQPLQHHNLLVCSVSG
FYPGSIEVRWFRNGQEEKAGVVSTGLIQNGDWTFQTLVMLETVPRSGEVY
TCQVEHPSVTSALTVEWRARSESAQSKMLSGVGGFVLGLLFLGAGLFIYF
RNQKGHSGLQPTGFLS.

### DRB3*03:01

[0204] In some cases, a TMAPP of the present disclosure comprises a DRB3*03:01 polypeptide comprising an amino acid sequence having at least 90%, at least 95%, at least 98%, at least 99%, or 100%, amino acid sequence identity to amino acids 30-227 of the DRB3*03:01 amino acid sequence provided below. In some cases, a TMAPP of the present disclosure comprises a DRB3*03:01 polypeptide comprising an amino acid sequence having at least 90%, at least 95%, at least 98%, at least 99%, or 100%, amino acid sequence identity to amino acids 30-124 of the DRB3*03:01 amino acid sequence provided below. In some cases, a TMAPP of the present disclosure comprises a DRB3*03:01 polypeptide comprising an amino acid sequence having at least 90%, at least 95%, at least 98%, at least 99%, or 100%, amino acid sequence identity to amino acids 125-227 of the DRB3*03:01 amino acid sequence provided below.

DRB3*03:01:
(SEQ ID NO: 93)
[sequence omitted]

### DRB4

[0205] In some cases, a TMAPP of the present disclosure comprises an MHC Class II β chain polypeptide of a DRB4 allele.

[0206] For example, in some cases, a TMAPP of the present disclosure comprises a DRB4*01:01 polypeptide comprising an amino acid sequence having at least 90%, at least 95%, at least 98%, at least 99%, or 100%, amino acid sequence identity to amino acids 30-227 of the DRB4*01:01 amino acid sequence provided below. In some cases, a TMAPP of the present disclosure comprises a DRB4*01:01 polypeptide comprising an amino acid sequence having at least 90%, at least 95%, at least 98%, at least 99%, or 100%, amino acid sequence identity to amino acids 30-124 of the DRB4*01:01 amino acid sequence provided below. In some cases, a TMAPP of the present disclosure comprises a DRB3*03:01 polypeptide comprising an amino acid sequence having at least 90%, at least 95%, at least 98%, at least 99%, or 100%, amino acid sequence identity to amino acids 125-227 of the DRB4*01:01 amino acid sequence provided below.

DRB4*01:01:
(SEQ ID NO: 94)
MVCLKLPGGSCMAALTVTLTVLSSPLALAGDTQPRFLEQAKCECHFLNGT
ERVWNLIRYIYNQEEYARYNSDLGEYQAVTELGRPDAEYWNSQKDLLERR
RAEVDTYCRYNYGVVESFTVQRRVQPKVTVYPSKTQPLQHHNLLVCSVNG
FYPGSIEVRWFRNSQEEKAGVVSTGLIQNGDWTFQTLVMLETVPRSGEVY
TCQVEHPSMMSPLTVQWSARSESAQSKMLSGVGGFVLGLLFLGTGLFIYF
RNQKGHSGLQPTGLLS.

### DRB5

[0207] In some cases, a TMAPP of the present disclosure comprises an MHC Class II β chain polypeptide of a DRB5 allele.

### DRB5*01:01

[0208] In some cases, a TMAPP of the present disclosure comprises a DRB5*01:01 polypeptide comprising an amino acid sequence having at least 90%, at least 95%, at least 98%, at least 99%, or 100%, amino acid sequence identity to amino acids 30-227 of the DRB5*01:01 amino acid sequence provided below. In some cases, a TMAPP of the present disclosure comprises a DRB5*01:01 polypeptide comprising an amino acid sequence having at least 90%, at least 95%, at least 98%, at least 99%, or 100%, amino acid sequence identity to amino acids 30-124 of the DRB5*01:01 amino acid sequence provided below. In some cases, a TMAPP of the present disclosure comprises a DRB5*01:01 polypeptide comprising an amino acid sequence having at least 90%, at least 95%, at least 98%, at least 99%, or 100%, amino acid sequence identity to amino acids 125-227 of the DRB5*01:01 amino acid sequence provided below.

DRB5*01:01:
(SEQ ID NO: 95)
MVLSSPLALAGDTRPRFLQQDKYECHFFNGTERVRFLHRDIYNQEEDLRF
DSDVGEYRAVTELGRPDAEYWNSQKDFLEDRRAAVDTYCRHNYGVGESFT
VQRRVEPKVTVYPARTQTLQHHNLLVCSVNGFYPGSIEVRWFRNSQEEKA
GVVSTGLIQNGDWTFQTLVMLETVPRSGEVYTCQVEHPSVTSPLTVEWRA
QSESAQSKMLSGVGGFVLGLLFLGAGLFIYFKNQKGHSGLHPTGLVS.

### DQB1

[0209] Certain DQB1 alleles are associated with increased risk that an individual expressing such an allele will develop an autoimmune disease such as multiple sclerosis. For example, DQB1*0301, and DQB1*0602 are associated with an increased risk of developing MS and/or a more severe MS phenotype (e.g., more severe inflammatory and neurodegenerative damage).

### DQB1*02:01

[0210] In some cases, a TMAPP of the present disclosure comprises a DQB1*02:01 polypeptide comprising an amino acid sequence having at least 90%, at least 95%, at least 98%, at least 99%, or 100%, amino acid sequence identity to amino acids 33-220 of the DQB1*02:01 amino acid sequence provided below. In some cases, a TMAPP of the present disclosure comprises a DQB1*02:01 polypeptide comprising an amino acid sequence having at least 90%, at least 95%, at least 98%, at least 99%, or 100%, amino acid sequence identity to amino acids 33-126 of the DQB1*02:01 amino acid sequence provided below. In some cases, a TMAPP of the present disclosure comprises a DQB1*02:01 polypeptide comprising an amino acid sequence having at least 90%, at least 95%, at least 98%, at least 99%, or 100%, amino acid sequence identity to amino acids 127-220 of the DQB1*02:01 amino acid sequence provided below.

DQB1*02:01:
(SEQ ID NO: 96)
MSWKKALRIPGGLRAATVTLMLSMLSTPVAEGRDSPEDFVYQFKGMCYFT
NGTERVRLVSRSIYNREEIVRFDSDVGEFRAVTLLGLPAAEYWNSQKDIL
ERKRAAVDRVCRHNYQLELRTTLQRRVEPTVTISPSRTEALNHHNLLVCS
VTDFYPAQIKVRWFRNDQEETAGVVSTPLIRNGDWTFQILVMLEMTPQRG
DVYTCHVEHPSLQSPITVEWRAQSESAQSKMLSGIGGFVLGLIFLGLGLI
IHHRSQKGLLH.

### DQB1*02:02

[0211] In some cases, a TMAPP of the present disclosure comprises a DQB1*02:02 polypeptide comprising an amino acid sequence having at least 90%, at least 95%, at least 98%, at least 99%, or 100%, amino acid sequence identity to amino acids 33-220 of the DQB1*02:02 amino acid sequence provided below. In some cases, a TMAPP of the present disclosure comprises a DQB1*02:02 polypeptide comprising an amino acid sequence having at least 90%, at least 95%, at least 98%, at least 99%, or 100%, amino acid sequence identity to amino acids 33-126 of the DQB1*02:02 amino acid sequence provided below. In some cases, a TMAPP of the present disclosure comprises a DQB1*02:02 polypeptide comprising an amino acid sequence having at least 90%, at least 95%, at least 98%, at least 99%, or 100%, amino acid sequence identity to amino acids 127-220 of the DQB1*02:02 amino acid sequence provided below.

DQB1*02:02:
(SEQ ID NO: 97)
MSWKKALRIPGGLRAATVTLMLSMLSTPVAEGRDSPEDFVYQFKGMCYFT
NGTERVRLVSRSIYNREEIVRFDSDVGEFRAVTLLGLPAAEYWNSQKDIL
ERKRAAVDRVCRHNYQLELRTTLQRRVEPTVTISPSRTEALNHHNLLVCS
VTDFYPAQIKVRWFRNGQEETAGVVSTPLIRNGDWTFQILVMLEMTPQRG
DVYTCHVEHPSLQSPITVEWRAQSESAQSKMLSGIGGFVLGLIFLGLGLI
IHHRSQKGLLH.

### DQB1*03:01

[0212] In some cases, a TMAPP of the present disclosure comprises a DQB1*0301 polypeptide comprising an amino acid sequence having at least 90%, at least 95%, at least 98%, at least 99%, or 100%, amino acid sequence identity to amino acids 33-220 of the DQB1*0301 amino acid sequence provided below. In some cases, a TMAPP of the present disclosure comprises a DQB1*0301 polypeptide comprising an amino acid sequence having at least 90%, at least 95%, at least 98%, at least 99%, or 100%, amino acid sequence identity to amino acids 33-126 of the DQB1*0301 amino acid sequence provided below. In some cases, a TMAPP of the present disclosure comprises a DQB1*0301 polypeptide comprising an amino acid sequence having at least 90%, at least 95%, at least 98%, at least 99%, or 100%, amino acid sequence identity to amino acids 127-220 of the DQB1*0301 amino acid sequence provided below.

DQB1*03:01:
(SEQ ID NO: 98)
MSWKKALRIPGGLRAATVTLMLAMLSTPVAEGRDSPEDFVYQFKAMCYFT
NGTERVRYVTRYIYNREEYARFDSDVEVYRAVTPLGPPDAEYWNSQKEVL
ERTRAELDTVCRHNYQLELRTTLQRRVEPTVTISPSRTEALNHHNLLVCS
VTDFYPAQIKVRWFRNDQEETTGVVSTPLIRNGDWTFQILVMLEMTPQHG
DVYTCHVEHPSLQNPITVEWRAQSESAQSKMLSGIGGFVLGLIFLGLGLI
IHHRSQKGLLH.

### DQB1*03:02

[0213] In some cases, a TMAPP of the present disclosure comprises a DQB1*0302 polypeptide comprising an amino acid sequence having at least 90%, at least 95%, at least 98%, at least 99%, or 100%, amino acid sequence identity to amino acids 33-220 of the DQB1*0302 amino acid sequence provided below. In some cases, a TMAPP of the present disclosure comprises a DQB1*0302 polypeptide comprising an amino acid sequence having at least 90%, at least 95%, at least 98%, at least 99%, or 100%, amino acid sequence identity to amino acids 33-126 of the DQB1*0302 amino acid sequence provided below. In some cases, a TMAPP of the present disclosure comprises a DQB1*0302 polypeptide comprising an amino acid sequence having at least 90%, at least 95%, at least 98%, at least 99%, or 100%, amino acid sequence identity to amino acids 127-220 of the DQB1*0302 amino acid sequence provided below.

DQB1*0302:
(SEQ ID NO: 99)
[sequence omitted]

### DQB1*03:03

[0214] In some cases, a TMAPP of the present disclosure comprises a DQB1*03:03 polypeptide comprising an amino acid sequence having at least 90%, at least 95%, at least 98%, at least 99%, or 100%, amino acid sequence identity to amino acids 33-220 of the DQB1*03:03 amino acid sequence provided below. In some cases, a TMAPP of the present disclosure comprises a DQB1*03:03 polypeptide comprising an amino acid sequence having at least 90%, at least 95%, at least 98%, at least 99%, or 100%, amino acid sequence identity to amino acids 33-126 of the DQB1*03:03 amino acid sequence provided below. In some cases, a TMAPP of the present disclosure comprises a DQB1*03:03 polypeptide comprising an amino acid sequence having at least 90%, at least 95%, at least 98%, at least 99%, or 100%, amino acid sequence identity to amino acids 127-220 of the DQB1*03:03 amino acid sequence provided below.

DQB1*03:03:
(SEQ ID NO: 100)
[sequence omitted]

### DQB1*03:04

[0215] In some cases, a TMAPP of the present disclosure comprises a DQB1*03:04 polypeptide comprising an amino acid sequence having at least 90%, at least 95%, at least 98%, at least 99%, or 100%, amino acid sequence identity to amino acids 33-220 of the DQB1*03:04 amino acid sequence provided below. In some cases, a TMAPP of the present disclosure comprises a DQB1*03:04 polypeptide comprising an amino acid sequence having at least 90%, at least 95%, at least 98%, at least 99%, or 100%, amino acid sequence identity to amino acids 33-126 of the DQB1*03:04 amino acid sequence provided below. In some cases, a TMAPP of the present disclosure comprises a DQB1*03:04 polypeptide comprising an amino acid sequence having at least 90%, at least 95%, at least 98%, at least 99%, or 100%, amino acid sequence identity to amino acids 127-220 of the DQB1*03:04 amino acid sequence provided below.

DQB1*03:04:
(SEQ ID NO: 101)
[sequence omitted]

### DQB1*04:01

[0216] In some cases, a TMAPP of the present disclosure comprises a DQB1*04:01 polypeptide comprising an amino acid sequence having at least 90%, at least 95%, at least 98%, at least 99%, or 100%, amino acid sequence identity to amino acids 33-220 of the DQB1*04:01 amino acid sequence provided below. In some cases, a TMAPP of the present disclosure comprises a DQB1*04:01 polypeptide comprising an amino acid sequence having at least 90%, at least 95%, at least 98%, at least 99%, or 100%, amino acid sequence identity to amino acids 33-126 of the DQB1*04:01 amino acid sequence provided below. In some cases, a TMAPP of the present disclosure comprises a DQB1*04:01 polypeptide comprising an amino acid sequence having at least 90%, at least 95%, at least 98%, at least 99%, or 100%, amino acid sequence identity to amino acids 127-220 of the DQB1*04:01 amino acid sequence provided below.

DQB1*04:01:
(SEQ ID NO: 102)
[sequence omitted]

### DQB1*04:02

[0217] In some cases, a TMAPP of the present disclosure comprises a DQB1*04:02 polypeptide comprising an amino acid sequence having at least 90%, at least 95%, at least 98%, at least 99%, or 100%, amino acid sequence identity to amino acids 33-220 of the DQB1*04:02 amino acid sequence provided below. In some cases, a TMAPP of the present disclosure comprises a DQB1*04:02 polypeptide comprising an amino acid sequence having at least 90%, at least 95%, at least 98%, at least 99%, or 100%, amino acid sequence identity to amino acids 33-126 of the DQB1*04:02 amino acid sequence provided below. In some cases, a TMAPP of the present disclosure comprises a DQB1*04:02 polypeptide comprising an amino acid sequence having at least 90%, at least 95%, at least 98%, at least 99%, or 100%, amino acid sequence identity to amino acids 127-220 of the DQB1*04:02 amino acid sequence provided below.

DQB1*04:02:
(SEQ ID NO: 386)
[sequence omitted]

### DQB1*05:01

[0218] In some cases, a TMAPP of the present disclosure comprises a DQB1*04:01 polypeptide comprising an amino acid sequence having at least 90%, at least 95%, at least 98%, at least 99%, or 100%, amino acid sequence identity to amino acids 33-220 of the DQB1*05:01 amino acid sequence provided below. In some cases, a TMAPP of the present disclosure comprises a DQB1*05:01 polypeptide comprising an amino acid sequence having at least 90%, at least 95%, at least 98%, at least 99%, or 100%, amino acid sequence identity to amino acids 33-126 of the DQB1*05:01 amino acid sequence provided below. In some cases, a TMAPP of the present disclosure comprises a DQB1*05:01 polypeptide comprising an amino acid sequence having at least 90%, at least 95%, at least 98%, at least 99%, or 100%, amino acid sequence identity to amino acids 127-220 of the DQB1*05:01 amino acid sequence provided below.

DQB1*05:01:
(SEQ ID NO: 387)
[sequence omitted]

### DQB1*05:03

[0219] In some cases, a TMAPP of the present disclosure comprises a DQB1*05:03 polypeptide comprising an amino acid sequence having at least 90%, at least 95%, at least 98%, at least 99%, or 100%, amino acid sequence identity to amino acids 33-220 of the DQB1*05:03 amino acid sequence provided below. In some cases, a TMAPP of the present disclosure comprises a DQB1*05:03 polypeptide comprising an amino acid sequence having at least 90%, at least 95%, at least 98%, at least 99%, or 100%, amino acid sequence identity to amino acids 33-126 of the DQB1*05:03 amino acid sequence provided below. In some cases, a TMAPP of the present disclosure comprises a DQB1*05:03 polypeptide comprising an amino acid sequence having at least 90%, at least 95%, at least 98%, at least 99%, or 100%, amino acid sequence identity to amino acids 127-220 of the DQB1*05:03 amino acid sequence provided below.

DQB1*05:03:
(SEQ ID NO: 388)
[sequence omitted]

### DQB1*06:01

[0220] In some cases, a TMAPP of the present disclosure comprises a DQB1*06:01 polypeptide comprising an amino acid sequence having at least 90%, at least 95%, at least 98%, at least 99%, or 100%, amino acid sequence identity to amino acids 33-220 of the DQB1*06:01 amino acid sequence provided below. In some cases, a TMAPP of the present disclosure comprises a DQB1*06:01 polypeptide comprising an amino acid sequence having at least 90%, at least 95%, at least 98%, at least 99%, or 100%, amino acid sequence identity to amino acids 33-126 of the DQB1*06:01 amino acid sequence provided below. In some cases, a TMAPP of the present disclosure comprises a DQB1*06:01 polypeptide comprising an amino acid sequence having at least 90%, at least 95%, at least 98%, at least 99%, or 100%, amino acid sequence identity to amino acids 127-220 of the DQB1*06:01 amino acid sequence provided below.

DQB1*06:01:
(SEQ ID NO: 389)
[sequence omitted]

### DQB1*06:02

[0221] In some cases, a TMAPP of the present disclosure comprises a DQB1*0602 polypeptide comprising an amino acid sequence having at least 90%, at least 95%, at least 98%, at least 99%, or 100%, amino acid sequence identity to amino acids 33-220 of the DQB1*0602 amino acid sequence depicted in FIG. 19A. In some cases, a TMAPP of the present disclosure comprises a DQB1*0602 polypeptide comprising an amino acid sequence having at least 90%, at least 95%, at least 98%, at least 99%, or 100%, amino acid sequence identity to amino acids 33-126 of the DQB1*0602 amino acid sequence depicted in FIG. 19A. In some cases, a TMAPP of the present disclosure comprises a DQB1*0602 polypeptide comprising an amino acid sequence having at least 90%, at least 95%, at least 98%, at least 99%, or 100%, amino acid sequence identity to amino acids 127-220 of the DQB1*0602 amino acid sequence depicted in FIG. 19A.

### DPB1

[0222] A TMAPP of the present disclosure can include an MHC Class II β chain of a DPB1 allele.

### DPB1*03:01

[0223] For example, in some cases, a TMAPP of the present disclosure comprises a DPB1*03:01 polypeptide comprising an amino acid sequence having at least 90%, at least 95%, at least 98%, at least 99%, or 100%, amino acid sequence identity to amino acids 30-215 of the DPB1*03:01 amino acid sequence provided below. In some cases, a TMAPP of the present disclosure comprises a DPB1*03:01 polypeptide comprising an amino acid sequence having at least 90%, at least 95%, at least 98%, at least 99%, or 100%, amino acid sequence identity to amino acids 30-121 of the DPB1*03:01 amino acid sequence provided below. In some cases, a TMAPP of the present disclosure comprises a DPB1*03:01 polypeptide comprising an amino acid sequence having at least 90%, at least 95%, at least 98%, at least 99%, or 100%, amino acid sequence identity to amino acids 122-215 of the DPB1*03:01 amino acid sequence provided below.

DPB1*03:01:
(SEQ ID NO: 390)
MMVLQVSAAPRTVALTALLMVLLTSVVQGRATPEN
YVYQLRQECYAFNGTQRFLERYIYNREEFVRFDSD
VGEFRAVTELGRPDEDYWNSQKDLLEEKRAVPDRV
CRHNYELDEAVTLQRRVQPKVNVSPSKKGPLQHHN
LLVCHVTDFYPGSIQVRWFLNGQEETAGVVSTNLI
RNGDWTFQILVMLEMTPQQGDVYICQVEHTSLDSP
VTVEWKAQSDSARSKTLTGAGGFVLGLIICGVGIF
MHRRSKKVQRGSA.

### DPB1*09:01

[0224] As another example, in some cases, a TMAPP of the present disclosure comprises a DPB1*09:01 polypeptide comprising an amino acid sequence having at least 90%, at least 95%, at least 98%, at least 99%, or 100%, amino acid sequence identity to amino acids 30-215 of the DPB1*09:01 amino acid sequence provided below. In some cases, a TMAPP of the present disclosure comprises a DPB1*09:01 polypeptide comprising an amino acid sequence having at least 90%, at least 95%, at least 98%, at least 99%, or 100%, amino acid sequence identity to amino acids 30-121 of the DPB1*09:01 amino acid sequence provided below. In some cases, a TMAPP of the present disclosure comprises a DPB1*09:01 polypeptide comprising an amino acid sequence having at least 90%, at least 95%, at least 98%, at least 99%, or 100%, amino acid sequence identity to amino acids 122-215 of the DPB1*09:01 amino acid sequence provided below.

DPB1*09:01:
(SEQ ID NO: 391)
[sequence omitted]

### DPB1*13:01

[0225] As another example, in some cases, a TMAPP of the present disclosure comprises a DPB1*13:01 polypeptide comprising an amino acid sequence having at least 90%, at least 95%, at least 98%, at least 99%, or 100%, amino acid sequence identity to amino acids 30-215 of the DPB1*13:01 amino acid sequence provided below. In some cases, a TMAPP of the present disclosure comprises a DPB1*13:01 polypeptide comprising an amino acid sequence having at least 90%, at least 95%, at least 98%, at least 99%, or 100%, amino acid sequence identity to amino acids 30-121 of the DPB1*13:01 amino acid sequence provided below. In some cases, a TMAPP of the present disclosure comprises a DPB1*13:01 polypeptide comprising an amino acid sequence having at least 90%, at least 95%, at least 98%, at least 99%, or 100%, amino acid sequence identity to amino acids 122-215 of the DPB1*13:01 amino acid sequence provided below.

DPB1*13:01:
(SEQ ID NO: 392)
[sequence omitted]

### DPB1*35:01

[0226] As another example, in some cases, a TMAPP of the present disclosure comprises a DPB1*35:01 polypeptide comprising an amino acid sequence having at least 90%, at least 95%, at least 98%, at least 99%, or 100%, amino acid sequence identity to amino acids 30-215 of the DPB1*35:01 amino acid sequence provided below. In some cases, a TMAPP of the present disclosure comprises a DPB1*35:01 polypeptide comprising an amino acid sequence having at least 90%, at least 95%, at least 98%, at least 99%, or 100%, amino acid sequence identity to amino acids 30-121 of the DPB1*35:01 amino acid sequence provided below. In some cases, a TMAPP of the present disclosure comprises a DPB1*35:01 polypeptide comprising an amino acid sequence having at least 90%, at least 95%, at least 98%, at least 99%, or 100%, amino acid sequence identity to amino acids 122-215 of the DPB1*35:01 amino acid sequence provided below.

DPB1*35:01:
(SEQ ID NO: 393)
[sequence omitted]

### DQA1

[0227] In some cases, a TMAPP of the present disclosure comprises an MHC Class II α chain polypeptide of a DQA1 allele.

### DQA1*01:01

[0228] For example, in some cases, a TMAPP of the present disclosure comprises a DQA1*01:01 polypeptide comprising an amino acid sequence having at least 90%, at least 95%, at least 98%, at least 99%, or 100%, amino acid sequence identity to amino acids 24-204 of the DQA1*01:01 amino acid sequence provided below. In some cases, a TMAPP of the present disclosure comprises a DQA1*01:01 polypeptide comprising an amino acid sequence having at least 90%, at least 95%, at least 98%, at least 99%, or 100%, amino acid sequence identity to amino acids 24-110 of the DQA1*01:01 amino acid sequence provided below. In some cases, a TMAPP of the present disclosure comprises a DQA1*01:01 polypeptide comprising an amino acid sequence having at least 90%, at least 95%, at least 98%, at least 99%, or 100%, amino acid sequence identity to amino acids 111-204 of the DQA1*01:01 amino acid sequence provided below.

DQA1*01:01:
(SEQ ID NO: 394)
[sequence omitted]

### DQA1*01:02

[0229] In some cases, a TMAPP of the present disclosure comprises a DQA1*01:02 polypeptide comprising an amino acid sequence having at least 90%, at least 95%, at least 98%, at least 99%, or 100%, amino acid sequence identity to amino acids 24-204 of the DQA*01:02 amino acid sequence provided below. In some cases, a TMAPP of the present disclosure comprises a DQA*01:02 polypeptide comprising an amino acid sequence having at least 90%, at least 95%, at least 98%, at least 99%, or 100%, amino acid sequence identity to amino acids 24-110 of the DQA*01:02 amino acid sequence provided below. In some cases, a TMAPP of the present disclosure comprises a DQA*01:02 polypeptide comprising an amino acid sequence having at least 90%, at least 95%, at least 98%, at least 99%, or 100%, amino acid sequence identity to amino acids 111-204 of the DQA*01:02 amino acid sequence provided below.

DQA1*01:02:
(SEQ ID NO: 395)
MILNKALLLGALALTTVMSPCGGEDIVADHVASCG
VNLYQFYGPSGQYTHEFDGDEQFYVDLERKETAWR
WPEFSKFGGFDPQGALRNMAVAKHNLNIMIKRYNS
TAATNEVPEVTVFSKSPVTLGQPNTLICLVDNIFP
PVVNITWLSNGQSVTEGVSETSFLSKSDHSFFKIS
YLTFLPSADEIYDCKVEHWGLDQPLLKHWEPEIPA
PMSELTETVVCALGLSVGLMGIVVGTVFIIQGLRS
VGASRHQGPL.

### DQA1*01:03

[0230] In some cases, a TMAPP of the present disclosure comprises a DQA1*01:03 polypeptide comprising an amino acid sequence having at least 90%, at least 95%, at least 98%, at least 99%, or 100%, amino acid sequence identity to amino acids 24-204 of the DQA*01:03 amino acid sequence provided below. In some cases, a TMAPP of the present disclosure comprises a DQA*01:03 polypeptide comprising an amino acid sequence having at least 90%, at least 95%, at least 98%, at least 99%, or 100%, amino acid sequence identity to amino acids 24-110 of the DQA*01:03 amino acid sequence provided below. In some cases, a TMAPP of the present disclosure comprises a DQA*01:03 polypeptide comprising an amino acid sequence having at least 90%, at least 95%, at least 98%, at least 99%, or 100%, amino acid sequence identity to amino acids 111-204 of the DQA*01:03 amino acid sequence provided below.

DQA1*01:03:
(SEQ ID NO: 396)
[sequence omitted]

### DQA1*01:04

[0231] As another example, in some cases, a TMAPP of the present disclosure comprises a DQA1*01:04 polypeptide comprising an amino acid sequence having at least 90%, at least 95%, at least 98%, at least 99%, or 100%, amino acid sequence identity to amino acids 24-204 of the DQA*01:04 amino acid sequence provided below. In some cases, a TMAPP of the present disclosure comprises a DQA*01:04 polypeptide comprising an amino acid sequence having at least 90%, at least 95%, at least 98%, at least 99%, or 100%, amino acid sequence identity to amino acids 24-110 of the DQA*01:04 amino acid sequence provided below. In some cases, a TMAPP of the present disclosure comprises a DQA*01:04 polypeptide comprising an amino acid sequence having at least 90%, at least 95%, at least 98%, at least 99%, or 100%, amino acid sequence identity to amino acids 111-204 of the DQA*01:04 amino acid sequence provided below.

DQA1*01:04:
(SEQ ID NO: 397)
[sequence omitted]

### DQA1*03:01

[0232] As another example, in some cases, a TMAPP of the present disclosure comprises a DQA1*03:01 polypeptide comprising an amino acid sequence having at least 90%, at least 95%, at least 98%, at least 99%, or 100%, amino acid sequence identity to amino acids 24-204 of the DQA1*03:01 amino acid sequence provided below. In some cases, a TMAPP of the present disclosure comprises a DQA1*03:01 polypeptide comprising an amino acid sequence having at least 90%, at least 95%, at least 98%, at least 99%, or 100%, amino acid sequence identity to amino acids 24-110 of the DQA1*03:01 amino acid sequence provided below. In some cases, a TMAPP of the present disclosure comprises a DQA1*03:01 polypeptide comprising an amino acid sequence having at least 90%, at least 95%, at least 98%, at least 99%, or 100%, amino acid sequence identity to amino acids 111-204 of the DQA1*03:01 amino acid sequence provided below.

DQA1*03:01:
(SEQ ID NO: 398)
MILNKALMLGALALTTVMSPCGGEDIVADHVASYG
VNLYQSYGPSGQYSHEFDGDEEFYVDLERKETVWQ
LPLFRRFRRFDPQFALTNIAVLKHNLNIVIKRSNS
TAATNEVPEVTVFSKSPVTLGQPNTLICLVDNIFP
PVVNITWLSNGHSVTEGVSETSFLSKSDHSFFKIS
YLTFLPSADEIYDCKVEHWGLDEPLLKHWEPEIPT
PMSELTETVVCALGLSVGLVGIVVGTVLIIRGLRS
VGASRHQGPL.

### DQA1*03:02

[0233] As another example, in some cases, a TMAPP of the present disclosure comprises a DQA1*03:02 polypeptide comprising an amino acid sequence having at least 90%, at least 95%, at least 98%, at least 99%, or 100%, amino acid sequence identity to amino acids 24-204 of the DQA1*03:02 amino acid sequence provided below. In some cases, a TMAPP of the present disclosure comprises a DQA1*03:02 polypeptide comprising an amino acid sequence having at least 90%, at least 95%, at least 98%, at least 99%, or 100%, amino acid sequence identity to amino acids 24-110 of the DQA1*03:02 amino acid sequence provided below. In some cases, a TMAPP of the present disclosure comprises a DQA1*03:02 polypeptide comprising an amino acid sequence having at least 90%, at least 95%, at least 98%, at least 99%, or 100%, amino acid sequence identity to amino acids 111-204 of the DQA1*03:02 amino acid sequence provided below.

DQA1*03:02:
(SEQ ID NO: 399)
MILNKALMLGALALTTVTSPCGGEDIVADHVASYGVNLYQSYGPSGQYSHE
FDGDEEFYVDLERKETVWQLPLFRRFRRFDPQFALTNIAVLKHNLNIVIKR
SNSTAATNEVPEVTVFSKSPVTLGQPNTLICLVDNIFPPVVNITWLSNGHS
VTEGVSETSFLSKSDHSFFKISYLTFLPSDDEIYDCKVEHWGLDEPLLKHW
EPEIPTPMSELTETVVCALGLSVGLVGIVVGTVLIIRGLRSVGASRHQGP
L.

### DQA1*04:01

[0234] As another example, in some cases, a TMAPP of the present disclosure comprises a DQA1*04:01 polypeptide comprising an amino acid sequence having at least 90%, at least 95%, at least 98%, at least 99%, or 100%, amino acid sequence identity to amino acids 24-204 of the DQA1*04:01 amino acid sequence provided below. In some cases, a TMAPP of the present disclosure comprises a DQA1*04:01 polypeptide comprising an amino acid sequence having at least 90%, at least 95%, at least 98%, at least 99%, or 100%, amino acid sequence identity to amino acids 24-110 of the DQA1*04:01 amino acid sequence provided below. In some cases, a TMAPP of the present disclosure comprises a DQA1*04:01 polypeptide comprising an amino acid sequence having at least 90%, at least 95%, at least 98%, at least 99%, or 100%, amino acid sequence identity to amino acids 111-204 of the DQA1*04:01 amino acid sequence provided below.

DQA1*04:01:
(SEQ ID NO: 400)
MILNKALLLGALALTTVMSPCGGEDIVADHVASYGVNLYQSYGPSGQYTHE
FDGDEQFYVDLGRKETVWCLPVLRQFRFDPQFALTNIAVTKHNLNILIKRS
NSTAATNEVPEVTVFSKSPVTLGQPNTLICLVDNIFPPVVNITWLSNGHSV
TEGVSETSFLSKSDHSFFKISYLTFLPSADEIYDCKVEHWGLDEPLLKHWE
PEIPAPMSELTETVVCALGLSVGLVGIVVGTVFIIRGLRSVGASRHQGPL.

### DQA1*05:01

[0235] As another example, in some cases, a TMAPP of the present disclosure comprises a DQA1*05:01 polypeptide comprising an amino acid sequence having at least 90%, at least 95%, at least 98%, at least 99%, or 100%, amino acid sequence identity to amino acids 24-204 of the DQA1*05:01 amino acid sequence provided below. In some cases, a TMAPP of the present disclosure comprises a DQA1*05:01 polypeptide comprising an amino acid sequence having at least 90%, at least 95%, at least 98%, at least 99%, or 100%, amino acid sequence identity to amino acids 24-110 of the DQA1*05:01 amino acid sequence provided below. In some cases, a TMAPP of the present disclosure comprises a DQA1*05:01 polypeptide comprising an amino acid sequence having at least 90%, at least 95%, at least 98%, at least 99%, or 100%, amino acid sequence identity to amino acids 111-204 of the DQA1*05:01 amino acid sequence provided below.

DQA1*05:01:
(SEQ ID NO: 401)
MILNKALMLGALALTTVMSPCGGEDIVADHVASYGVNLYQSYGPSGQYTHE
FDGDEQFYVDLGRKETVWCLPVLRQFRFDPQFALTNIAVLKHNLNSLIKRS
NSTAATNEVPEVTVFSKSPVTLGQPNILICLVDNIFPPVVNITWLSNGHSV
TEGVSETSFLSKSDHSFFKISYLTLLPSAEESYDCKVEHWGLDKPLLKHWE
PEIPAPMSELTETVVCALGLSVGLVGIVVGTVFIIRGLRSVGASRHQGPL.

### DQA1*06:01

[0236] As another example, in some cases, a TMAPP of the present disclosure comprises a DQA1*06:01 polypeptide comprising an amino acid sequence having at least 90%, at least 95%, at least 98%, at least 99%, or 100%, amino acid sequence identity to amino acids 24-204 of the DQA1*06:01 amino acid sequence provided below. In some cases, a TMAPP of the present disclosure comprises a DQA1*06:01 polypeptide comprising an amino acid sequence having at least 90%, at least 95%, at least 98%, at least 99%, or 100%, amino acid sequence identity to amino acids 24-110 of the DQA1*06:01 amino acid sequence provided below. In some cases, a TMAPP of the present disclosure comprises a DQA1*06:01 polypeptide comprising an amino acid sequence having at least 90%, at least 95%, at least 98%, at least 99%, or 100%, amino acid sequence identity to amino acids 111-204 of the DQA1*06:01 amino acid sequence provided below.

DQA1*06:01:
(SEQ ID NO: 402)
[sequence omitted]

### DRA1

[0237] In some cases, a TMAPP of the present disclosure comprises an MHC Class II α chain polypeptide of a DRA1 allele.

### DRA1*01:01

[0238] For example, in some cases, a TMAPP of the present disclosure comprises a DRA1*01:01 (also referred to as “DRA*01:01”; referred to in FIG. 39 as “DRA1*01:01) polypeptide comprising an amino acid sequence having at least 90%, at least 95%, at least 98%, at least 99%, or 100%, amino acid sequence identity to amino acids 26-203 of the DRA1*01:01 amino acid sequence provided below. In some cases, a TMAPP of the present disclosure comprises a DRA1*01:01 polypeptide comprising an amino acid sequence having at least 90%, at least 95%, at least 98%, at least 99%, or 100%, amino acid sequence identity to amino acids 26-109 of the DRA1*01:01 amino acid sequence provided below. In some cases, a TMAPP of the present disclosure comprises a DRA1*01:01 polypeptide comprising an amino acid sequence having at least 90%, at least 95%, at least 98%, at least 99%, or 100%, amino acid sequence identity to amino acids 110-203 of the DRA1*01:01 amino acid sequence provided below.

DRA1*01:01:
(SEQ ID NO: 403)
MAISGVPVLGFFIIAVLMSAQESWAIKEEHVIIQAEFYLNPDQSGEFMFDF
DGDEIFHVDMAKKETVWRLEEFGRFASFEAQGALANIAVDKANLEIMTKRS
NYTPITNVPPEVTVLTNSPVELREPNVLICFIDKFTPPVVNVTWLRNGKPV
TTGVSETVFLPREDHLFRKFHYLPFLPSTEDVYDCRVEHWGLDEPLLKHWE
FDAPSPLPETTENVVCALGLTVGLVGIIIGTIFIIKGVRKSNAAERRGPL.

### Combinations (Haplotypes)

[0239] A TMAPP of the present disclosure can comprise any combination of MHC α chains and MHC β chains, e.g., where the α chain is a DRA α chain and the β chain is a DRB β chain; where the α chain is a DQA α chain and the β chain is a DQB β chain, etc. The following are examples of possible combinations (haplotypes).

### DQA1*01:01 and DQB1*05:01

[0240] In some cases, a TMAPP of the present disclosure comprises: i) an MHC α chain polypeptide comprising an amino acid sequence having at least 60%, at least 70%, at least 80%, at least 90%, at least 95%, at least 98%, at least 99%, or 100%, amino acid sequence identity to a contiguous stretch of from about 70 amino acids to about 200 amino acids (e.g., from about 70 aa to about 100 aa, or from about 100 aa to about 150 aa, or from about 150 aa to about 200 aa) of a DQA1*01:01 α chain polypeptide; and ii) an MHC β chain polypeptide comprising an amino acid sequence having at least 60%, at least 70%, at least 80%, at least 90%, at least 95%, at least 98%, at least 99%, or 100%, amino acid sequence identity to a contiguous stretch of from about 70 amino acids to about 200 amino acids (e.g., from about 70 aa to about 100 aa, or from about 100 aa to about 150 aa, or from about 150 aa to about 200 aa) of a DQB1*05:01 β chain polypeptide. In some cases, a TMAPP of the present disclosure comprises: i) a DQA1*01:01 α chain polypeptide; and ii) a DQB1*05:01 β chain polypeptide.

### DRA1*01:01 and DRB1*04:01

[0241] In some cases, a TMAPP of the present disclosure comprises: i) an MHC α chain polypeptide comprising an amino acid sequence having at least 60%, at least 70%, at least 80%, at least 90%, at least 95%, at least 98%, at least 99%, or 100%, amino acid sequence identity to a contiguous stretch of from about 70 amino acids to about 200 amino acids (e.g., from about 70 aa to about 100 aa, or from about 100 aa to about 150 aa, or from about 150 aa to about 200 aa) of a DRA1*01:01 α chain polypeptide; and ii) an MHC β chain polypeptide comprising an amino acid sequence having at least 60%, at least 70%, at least 80%, at least 90%, at least 95%, at least 98%, at least 99%, or 100%, amino acid sequence identity to a contiguous stretch of from about 70 amino acids to about 200 amino acids (e.g., from about 70 aa to about 100 aa, or from about 100 aa to about 150 aa, or from about 150 aa to about 200 aa) of a DRB1*04:01 β chain polypeptide. In some cases, a TMAPP of the present disclosure comprises: i) a DRA1*01:01 α chain polypeptide; and ii) a DRB1*04:01 β chain polypeptide.

### DRA1*01:01 (DRA*01:01) and DRB5*01:01

[0242] In some cases, a TMAPP of the present disclosure comprises: i) an MHC α chain polypeptide comprising an amino acid sequence having at least 60%, at least 70%, at least 80%, at least 90%, at least 95%, at least 98%, at least 99%, or 100%, amino acid sequence identity to a contiguous stretch of from about 70 amino acids to about 200 amino acids (e.g., from about 70 aa to about 100 aa, or from about 100 aa to about 150 aa, or from about 150 aa to about 200 aa) of a DRA1*01:01 α chain polypeptide; and ii) an MHC β chain polypeptide comprising an amino acid sequence having at least 60%, at least 70%, at least 80%, at least 90%, at least 95%, at least 98%, at least 99%, or 100%, amino acid sequence identity to a contiguous stretch of from about 70 amino acids to about 200 amino acids (e.g., from about 70 aa to about 100 aa, or from about 100 aa to about 150 aa, or from about 150 aa to about 200 aa) of a DRB5*01:01 β chain polypeptide. In some cases, a TMAPP of the present disclosure comprises: i) a DRA1*01:01 α chain polypeptide; and ii) a DRB5*01:01 β chain polypeptide.

### DRA1*01:01 and DRB1*15:01

[0243] In some cases, a TMAPP of the present disclosure comprises: i) an MHC α chain polypeptide comprising an amino acid sequence having at least 60%, at least 70%, at least 80%, at least 90%, at least 95%, at least 98%, at least 99%, or 100%, amino acid sequence identity to a contiguous stretch of from about 70 amino acids to about 200 amino acids (e.g., from about 70 aa to about 100 aa, or from about 100 aa to about 150 aa, or from about 150 aa to about 200 aa) of a DRA1*01:01 α chain polypeptide; and ii) an MHC β chain polypeptide comprising an amino acid sequence having at least 60%, at least 70%, at least 80%, at least 90%, at least 95%, at least 98%, at least 99%, or 100%, amino acid sequence identity to a contiguous stretch of from about 70 amino acids to about 200 amino acids (e.g., from about 70 aa to about 100 aa, or from about 100 aa to about 150 aa, or from about 150 aa to about 200 aa) of a DRB1*15:01 β chain polypeptide. In some cases, a TMAPP of the present disclosure comprises: i) a DRA1*01:01 α chain polypeptide; and ii) a DRB1*15:01 β chain polypeptide.

### DQA1*01:02 and DQB1*06:02

[0244] In some cases, a TMAPP of the present disclosure comprises: i) an MHC α chain polypeptide comprising an amino acid sequence having at least 60%, at least 70%, at least 80%, at least 90%, at least 95%, at least 98%, at least 99%, or 100%, amino acid sequence identity to a contiguous stretch of from about 70 amino acids to about 200 amino acids (e.g., from about 70 aa to about 100 aa, or from about 100 aa to about 150 aa, or from about 150 aa to about 200 aa) of a DQA1*01:02 α chain polypeptide; and ii) an MHC β chain polypeptide comprising an amino acid sequence having at least 60%, at least 70%, at least 80%, at least 90%, at least 95%, at least 98%, at least 99%, or 100%, amino acid sequence identity to a contiguous stretch of from about 70 amino acids to about 200 amino acids (e.g., from about 70 aa to about 100 aa, or from about 100 aa to about 150 aa, or from about 150 aa to about 200 aa) of a DQB1*06:02 β chain polypeptide. In some cases, a TMAPP of the present disclosure comprises: i) a DQA1*01:02 α chain polypeptide; and ii) a DQB1*06:02 β chain polypeptide.

### DQA1*03:01 and DQB1*03:03

[0245] In some cases, a TMAPP of the present disclosure comprises: i) an MHC α chain polypeptide comprising an amino acid sequence having at least 60%, at least 70%, at least 80%, at least 90%, at least 95%, at least 98%, at least 99%, or 100%, amino acid sequence identity to a contiguous stretch of from about 70 amino acids to about 200 amino acids (e.g., from about 70 aa to about 100 aa, or from about 100 aa to about 150 aa, or from about 150 aa to about 200 aa) of a DQA1*03:01 α chain polypeptide; and ii) an MHC β chain polypeptide comprising an amino acid sequence having at least 60%, at least 70%, at least 80%, at least 90%, at least 95%, at least 98%, at least 99%, or 100%, amino acid sequence identity to a contiguous stretch of from about 70 amino acids to about 200 amino acids (e.g., from about 70 aa to about 100 aa, or from about 100 aa to about 150 aa, or from about 150 aa to about 200 aa) of a DQB1*03:02 β chain polypeptide. In some cases, a TMAPP of the present disclosure comprises: i) a DQA1*03:01 α chain polypeptide; and ii) a DQB1*03:02 β chain polypeptide.

### DQA1*01:04 and DQB1*05:01

[0246] In some cases, a TMAPP of the present disclosure comprises: i) an MHC α chain polypeptide comprising an amino acid sequence having at least 60%, at least 70%, at least 80%, at least 90%, at least 95%, at least 98%, at least 99%, or 100%, amino acid sequence identity to a contiguous stretch of from about 70 amino acids to about 200 amino acids (e.g., from about 70 aa to about 100 aa, or from about 100 aa to about 150 aa, or from about 150 aa to about 200 aa) of a DQA1*01:04 α chain polypeptide; and ii) an MHC β chain polypeptide comprising an amino acid sequence having at least 60%, at least 70%, at least 80%, at least 90%, at least 95%, at least 98%, at least 99%, or 100%, amino acid sequence identity to a contiguous stretch of from about 70 amino acids to about 200 amino acids (e.g., from about 70 aa to about 100 aa, or from about 100 aa to about 150 aa, or from about 150 aa to about 200 aa) of a DQB1*05:01 β chain polypeptide. In some cases, a TMAPP of the present disclosure comprises: i) a DQA1*01:04 α chain polypeptide; and ii) a DQB1*05:01 β chain polypeptide.

### DRA1*01:01 and DRB1*01:01

[0247] In some cases, a TMAPP of the present disclosure comprises: i) an MHC α chain polypeptide comprising an amino acid sequence having at least 60%, at least 70%, at least 80%, at least 90%, at least 95%, at least 98%, at least 99%, or 100%, amino acid sequence identity to a contiguous stretch of from about 70 amino acids to about 200 amino acids (e.g., from about 70 aa to about 100 aa, or from about 100 aa to about 150 aa, or from about 150 aa to about 200 aa) of a DRA1*01:01 α chain polypeptide; and ii) an MHC β chain polypeptide comprising an amino acid sequence having at least 60%, at least 70%, at least 80%, at least 90%, at least 95%, at least 98%, at least 99%, or 100%, amino acid sequence identity to a contiguous stretch of from about 70 amino acids to about 200 amino acids (e.g., from about 70 aa to about 100 aa, or from about 100 aa to about 150 aa, or from about 150 aa to about 200 aa) of a DRB1*01:01 β chain polypeptide. In some cases, a TMAPP of the present disclosure comprises: i) a DRA1*01:01 α chain polypeptide; and ii) a DRB1*01:01 β chain polypeptide.

### DQA1*04:01 and DQB1*04:02

[0248] In some cases, a TMAPP of the present disclosure comprises: i) an MHC α chain polypeptide comprising an amino acid sequence having at least 60%, at least 70%, at least 80%, at least 90%, at least 95%, at least 98%, at least 99%, or 100%, amino acid sequence identity to a contiguous stretch of from about 70 amino acids to about 200 amino acids (e.g., from about 70 aa to about 100 aa, or from about 100 aa to about 150 aa, or from about 150 aa to about 200 aa) of a DQA1*04:01 α chain polypeptide; and ii) an MHC β chain polypeptide comprising an amino acid sequence having at least 60%, at least 70%, at least 80%, at least 90%, at least 95%, at least 98%, at least 99%, or 100%, amino acid sequence identity to a contiguous stretch of from about 70 amino acids to about 200 amino acids (e.g., from about 70 aa to about 100 aa, or from about 100 aa to about 150 aa, or from about 150 aa to about 200 aa) of a DQB1*04:02 β chain polypeptide. In some cases, a TMAPP of the present disclosure comprises: i) a DQA1*04:01 α chain polypeptide; and ii) a DQB1*04:02 β chain polypeptide.

### DQA1*03:02 and DQB1*03:01

[0249] In some cases, a TMAPP of the present disclosure comprises: i) an MHC α chain polypeptide comprising an amino acid sequence having at least 60%, at least 70%, at least 80%, at least 90%, at least 95%, at least 98%, at least 99%, or 100%, amino acid sequence identity to a contiguous stretch of from about 70 amino acids to about 200 amino acids (e.g., from about 70 aa to about 100 aa, or from about 100 aa to about 150 aa, or from about 150 aa to about 200 aa) of a DQA1*03:02 α chain polypeptide; and ii) an MHC β chain polypeptide comprising an amino acid sequence having at least 60%, at least 70%, at least 80%, at least 90%, at least 95%, at least 98%, at least 99%, or 100%, amino acid sequence identity to a contiguous stretch of from about 70 amino acids to about 200 amino acids (e.g., from about 70 aa to about 100 aa, or from about 100 aa to about 150 aa, or from about 150 aa to about 200 aa) of a DQB1*03:01 β chain polypeptide. In some cases, a TMAPP of the present disclosure comprises: i) a DQA1*03:02 α chain polypeptide; and ii) a DQB1*03:01 β chain polypeptide.

### DQA1*01:03 and DQB1*06:01

[0250] In some cases, a TMAPP of the present disclosure comprises: i) an MHC α chain polypeptide comprising an amino acid sequence having at least 60%, at least 70%, at least 80%, at least 90%, at least 95%, at least 98%, at least 99%, or 100%, amino acid sequence identity to a contiguous stretch of from about 70 amino acids to about 200 amino acids (e.g., from about 70 aa to about 100 aa, or from about 100 aa to about 150 aa, or from about 150 aa to about 200 aa) of a DQA1*01:03 α chain polypeptide; and ii) an MHC β chain polypeptide comprising an amino acid sequence having at least 60%, at least 70%, at least 80%, at least 90%, at least 95%, at least 98%, at least 99%, or 100%, amino acid sequence identity to a contiguous stretch of from about 70 amino acids to about 200 amino acids (e.g., from about 70 aa to about 100 aa, or from about 100 aa to about 150 aa, or from about 150 aa to about 200 aa) of a DQB1*06:01 β chain polypeptide. In some cases, a TMAPP of the present disclosure comprises: i) a DQA1*01:03 α chain polypeptide; and ii) a DQB1*06:01 β chain polypeptide.

[0251] In some cases, a TMAPP of the present disclosure comprises an MHC Class II α- and/or β-chain allele that is associated with increased risk of developing a disease, e.g., where the individual to be treated with the TMAPP expresses the MHC Class II α- and/or β-chain allele.

### Scaffold Polypeptides

[0252] A TMAPP of the present disclosure, whether multimeric or monomeric, can comprise an immunoglobulin or non-immunoglobulin scaffold. A TMAPP polypeptide of the present disclosure, whether multimeric or monomeric, can comprise an Fc polypeptide, or can comprise another suitable scaffold polypeptide.

[0253] Suitable scaffold polypeptides include antibody-based scaffold polypeptides and non-antibody-based scaffolds. Non-antibody-based scaffolds include, e.g., albumin, an XTEN (extended recombinant) polypeptide, transferrin, an Fc receptor polypeptide, an elastin-like polypeptide (see, e.g., Hassouneh et al. (2012) Methods Enzymol. 502:215; e.g., a polypeptide comprising a pentapeptide repeat unit of (Val-Pro-Gly-X-Gly; SEQ ID NO: 59), where X is any amino acid other than proline), an albumin-binding polypeptide, a silk-like polypeptide (see, e.g., Valluzzi et al. (2002) Philos Trans R Soc Loud B Biol Sci. 357:165), a silk-elastin-like polypeptide (SELP; see, e.g., Megeed et al. (2002) Adv Drug Deliv Rev. 54:1075), and the like. Suitable XTEN polypeptides include, e.g., those disclosed in WO 2009/023270, WO 2010/091122, WO 2007/103515, US 2010/0189682, and US 2009/0092582; see also Schellenberger et al. (2009) Nat Biotechnol. 27:1186). Suitable albumin polypeptides include, e.g., human serum albumin.

[0254] Suitable scaffold polypeptides will in some cases be a half-life extending polypeptides. Thus, in some cases, a suitable scaffold polypeptide increases the in vivo half-life (e.g., the serum half-life) of the multimeric polypeptide, compared to a control multimeric polypeptide lacking the scaffold polypeptide. For example, in some cases, a scaffold polypeptide increases the in vivo half-life (e.g., the serum half-life) of the multimeric polypeptide, compared to a control multimeric polypeptide lacking the scaffold polypeptide, by at least about 10%, at least about 15%, at least about 20%, at least about 25%, at least about 50%, at least about 2-fold, at least about 2.5-fold, at least about 5-fold, at least about 10-fold, at least about 25-fold, at least about 50-fold, at least about 100-fold, or more than 100-fold. As an example, in some cases, an Fc polypeptide increases the in vivo half-life (e.g., the serum half-life) of the multimeric polypeptide, compared to a control multimeric polypeptide lacking the Fc polypeptide, by at least about 10%, at least about 15%, at least about 20%, at least about 25%, at least about 50%, at least about 2-fold, at least about 2.5-fold, at least about 5-fold, at least about 10-fold, at least about 25-fold, at least about 50-fold, at least about 100-fold, or more than 100-fold.

### Fc Polypeptides

[0255] In some cases, the first and/or the second polypeptide chain of a TMMP of the present disclosure comprises an Fc polypeptide. The Fc polypeptide of a TMMP of the present disclosure can be a human IgG1 Fc, a human IgG2 Fc, a human IgG3 Fc, a human IgG4 Fc, etc. In some cases, the Fc polypeptide comprises an amino acid sequence having at least about 70%, at least about 75%, at least about 80%, at least about 85%, at least about 90%, at least about 95%, at least about 98%, at least about 99%, or 100%, amino acid sequence identity to an amino acid sequence of an Fc region depicted in FIG. 21A-21G. In some cases, the Fc region comprises an amino acid sequence having at least about 70%, at least about 75%, at least about 80%, at least about 85%, at least about 90%, at least about 95%, at least about 98%, at least about 99%, or 100%, amino acid sequence identity to the human IgG1 Fc polypeptide depicted in FIG. 21A. In some cases, the Fc region comprises an amino acid sequence having at least about 70%, at least about 75%, at least about 80%, at least about 85%, at least about 90%, at least about 95%, at least about 98%, at least about 99%, or 100%, amino acid sequence identity to the human IgG1 Fc polypeptide depicted in FIG. 21A; and comprises a substitution of N77; e.g., the Fc polypeptide comprises an N77A substitution. In some cases, the Fc polypeptide comprises an amino acid sequence having at least about 70%, at least about 75%, at least about 80%, at least about 85%, at least about 90%, at least about 95%, at least about 98%, at least about 99%, or 100%, amino acid sequence identity to the human IgG2 Fc polypeptide depicted in FIG. 21A; e.g., the Fc polypeptide comprises an amino acid sequence having at least about 70%, at least about 75%, at least about 80%, at least about 85%, at least about 90%, at least about 95%, at least about 98%, at least about 99%, or 100%, amino acid sequence identity to amino acids 99-325 of the human IgG2 Fc polypeptide depicted in FIG. 21A. In some cases, the Fc polypeptide comprises an amino acid sequence having at least about 70%, at least about 75%, at least about 80%, at least about 85%, at least about 90%, at least about 95%, at least about 98%, at least about 99%, or 100%, amino acid sequence identity to the human IgG3 Fc polypeptide depicted in FIG. 21A; e.g., the Fc polypeptide comprises an amino acid sequence having at least about 70%, at least about 75%, at least about 80%, at least about 85%, at least about 90%, at least about 95%, at least about 98%, at least about 99%, or 100%, amino acid sequence identity to amino acids 19-246 of the human IgG3 Fc polypeptide depicted in FIG. 21A. In some cases, the Fc polypeptide comprises an amino acid sequence having at least about 70%, at least about 75%, at least about 80%, at least about 85%, at least about 90%, at least about 95%, at least about 98%, at least about 99%, or 100%, amino acid sequence identity to the human IgM Fc polypeptide depicted in FIG. 21B; e.g., the Fc polypeptide comprises an amino acid sequence having at least about 70%, at least about 75%, at least about 80%, at least about 85%, at least about 90%, at least about 95%, at least about 98%, at least about 99%, or 100%, amino acid sequence identity to amino acids 1-276 to the human IgM Fc polypeptide depicted in FIG. 21B. In some cases, the Fc polypeptide comprises an amino acid sequence having at least about 70%, at least about 75%, at least about 80%, at least about 85%, at least about 90%, at least about 95%, at least about 98%, at least about 99%, or 100%, amino acid sequence identity to the human IgA Fc polypeptide depicted in FIG. 21C; e.g., the Fc polypeptide comprises an amino acid sequence having at least about 70%, at least about 75%, at least about 80%, at least about 85%, at least about 90%, at least about 95%, at least about 98%, at least about 99%, or 100%, amino acid sequence identity to amino acids 1-234 to the human IgA Fc polypeptide depicted in FIG. 21C.

[0256] In some cases, the Fc polypeptide comprises an amino acid sequence having at least about 70%, at least about 75%, at least about 80%, at least about 85%, at least about 90%, at least about 95%, at least about 98%, at least about 99%, or 100%, amino acid sequence identity to the human IgG4 Fc polypeptide depicted in FIG. 21C. In some cases, the Fc polypeptide comprises an amino acid sequence having at least about 70%, at least about 75%, at least about 80%, at least about 85%, at least about 90%, at least about 95%, at least about 98%, at least about 99%, or 100%, amino acid sequence identity to amino acids 100 to 327 of the human IgG4 Fc polypeptide depicted in FIG. 21C.

[0257] In some cases, the IgG4 Fc polypeptide comprises the following amino acid sequence:

(SEQ ID NO: 60)
PPCPSCPAPEFLGGPSVFLFPPKPKDTLMISRTPEVTCVVVDVSQEDPEVQ
FNWYVDGVEVHNAKTKPREEQFNSTYRVVSVLTVLHQDWLNGKEYKCKVSN
KGLPSSIEKTISKAKGQPREPQVYTLPPSQEEMTKNQVSLTCLVKGFYPSD
IAVEWESNGQPENNYKTTPPVLDSDGSFFLYSRLTVDKSRWQEGNVFSCSV
MHEALHNHYTQKSLSLSPG.

[0258] In some cases, the Fc polypeptide present in a TMMP comprises the amino acid sequence depicted in FIG. 21A (human IgG1 Fc). In some cases, the Fc polypeptide present in a TMMP comprises the amino acid sequence depicted in FIG. 21A (human IgG1 Fc), except for a substitution of N297 (N77 of the amino acid sequence depicted in FIG. 21A) with an amino acid other than asparagine. In some cases, the Fc polypeptide present in a TMMP comprises the amino acid sequence depicted in FIG. 21C (human IgG1 Fc comprising an N297A substitution, which is N77 of the amino acid sequence depicted in FIG. 21A). In some cases, the Fc polypeptide present in a TMMP comprises the amino acid sequence depicted in FIG. 21A (human IgG1 Fc), except for a substitution of L234 (L14 of the amino acid sequence depicted in FIG. 21A) with an amino acid other than leucine. In some cases, the Fc polypeptide present in a TMMP comprises the amino acid sequence depicted in FIG. 21A (human IgG1 Fc), except for a substitution of L235 (L15 of the amino acid sequence depicted in FIG. 21A) with an amino acid other than leucine.

[0259] In some cases, the Fc polypeptide present in a TMMP comprises the amino acid sequence depicted in FIG. 21E. In some cases, the Fc polypeptide present in a TMMP comprises the amino acid sequence depicted in FIG. 21F. In some cases, the Fc polypeptide present in a TMMP comprises the amino acid sequence depicted in FIG. 21G (human IgG1 Fc comprising an L234A substitution and an L235A substitution, corresponding to positions 14 and 15 of the amino acid sequence depicted in FIG. 21G). In some cases, the Fc polypeptide present in a TMMP comprises the amino acid sequence depicted in FIG. 21A (human IgG1 Fc), except for a substitution of P331 (P111 of the amino acid sequence depicted in FIG. 21A) with an amino acid other than proline; in some cases, the substitution is a P331S substitution. In some cases, the Fc polypeptide present in a TMMP comprises the amino acid sequence depicted in FIG. 21A (human IgG1 Fc), except for substitutions at L234 and L235 (L14 and L15 of the amino acid sequence depicted in FIG. 21A) with amino acids other than leucine. In some cases, the Fc polypeptide present in a TMMP comprises the amino acid sequence depicted in FIG. 21A (human IgG1 Fc), except for substitutions at L234 and L235 (L14 and L15 of the amino acid sequence depicted in FIG. 21A) with amino acids other than leucine, and a substitution of P331 (P111 of the amino acid sequence depicted in FIG. 21A) with an amino acid other than proline. In some cases, the Fc polypeptide present in a TMMP comprises the amino acid sequence depicted in FIG. 21E (human IgG1 Fc comprising L234F, L235E, and P331S substitutions (corresponding to amino acid positions 14, 15, and 111 of the amino acid sequence depicted in FIG. 21E). In some cases, the Fc polypeptide present in a TMMP is an IgG1 Fc polypeptide that comprises L234A and L235A substitutions (substitutions of L14 and L15 of the amino acid sequence depicted in FIG. 21A with Ala), as depicted in FIG. 21G.

### Linkers

[0260] As noted above, a TMAPP of the present disclosure can include a linker peptide interposed between, e.g., an epitope and an MHC polypeptide; between an MHC polypeptide and an Ig Fc polypeptide; between a first MHC polypeptide and a second MHC polypeptide; etc.

[0261] Suitable linkers (also referred to as “spacers”) can be readily selected and can be of any of a number of suitable lengths, such as from 1 amino acid to 25 amino acids, from 3 amino acids to 20 amino acids, from 2 amino acids to 15 amino acids, from 3 amino acids to 12 amino acids, including 4 amino acids to 10 amino acids, 5 amino acids to 9 amino acids, 6 amino acids to 8 amino acids, or 7 amino acids to 8 amino acids. A suitable linker can be 1, 2, 3, 4, 5, 6, 7, 8, 9, 10, 11, 12, 13, 14, 15, 16, 17, 18, 19, 20, 21, 22, 23, 24, or 25 amino acids in length. A suitable linker can be from 25 to 35 amino acids in length. A suitable linker can be 25, 26, 27, 28, 29, 30, 31, 32, 33, 34, or 35 amino acids in length. A suitable linker can be from 35 to 45 amino acids in length. A suitable linker can be 35, 36, 37, 38, 39, 40, 41, 42, 43, 44, or 45 amino acids in length. A suitable linker can be from 45 to 50 amino acids in length. A suitable linker can be 45, 46, 47, 48, 49, or 50 amino acids in length.

[0262] Exemplary linkers include glycine polymers (G)ₙ, glycine-serine polymers (including, for example, (GS)ₙ, (GSGGS)ₙ (SEQ ID NO: 61) and (GGGS)ₙ (SEQ ID NO: 62), where n is an integer of at least one), glycine-alanine polymers, alanine-serine polymers, and other flexible linkers known in the art. Glycine and glycine-serine polymers can be used; both Gly and Ser are relatively unstructured, and therefore can serve as a neutral tether between components. Glycine polymers can be used; glycine accesses significantly more phi-psi space than even alanine, and is much less restricted than residues with longer side chains (see Scheraga, Rev. Computational Chem. 11173-142 (1992)). Exemplary linkers can comprise amino acid sequences including, but not limited to, GGSG (SEQ ID NO: 63), GGSGG (SEQ ID NO: 64), GSGSG (SEQ ID NO: 65), GSGGG (SEQ ID NO: 66), GGGSG (SEQ ID NO: 67), GSSSG (SEQ ID NO: 68), and the like. Exemplary linkers can include, e.g., Gly(Ser₄)n, (SEQ ID NO: 69) where n is 1, 2, 3, 4, 5, 6, 7, 8, 9, or 10. In some cases, a linker comprises the amino acid sequence (GSSSS)n (SEQ ID NO: 435), where n is 4. In some cases, a linker comprises the amino acid sequence (GSSSS)n (SEQ ID NO: 436), where n is 5. Exemplary linkers can include, e.g., (GlyGlyGlyGlySer)n (SEQ ID NO: 437), where n is 1, 2, 3, 4, 5, 6, 7, 8, 9, or 10. In some cases, a linker comprises the amino acid sequence (GGGGS)n (SEQ ID NO: 423), where n is 1. In some cases, a linker comprises the amino acid sequence (GGGGS)n (SEQ ID NO: 424), where n is 2. In some cases, a linker comprises the amino acid sequence (GGGGS)n (SEQ ID NO: 301), where n is 3. In some cases, a linker comprises the amino acid sequence (GGGGS)n (SEQ ID NO: 302), where n is 4. In some cases, a linker comprises the amino acid sequence (GGGGS)n (SEQ ID NO: 425), where n is 5. In some cases, a linker comprises the amino acid sequence (GGGGS)n (SEQ ID NO: 426), where n is 6. In some cases, a linker comprises the amino acid sequence (GGGGS)n (SEQ ID NO: 427), where n is 7. In some cases, a linker comprises the amino acid sequence (GGGGS)n (SEQ ID NO: 428), where n is 8. In some cases, a linker comprises the amino acid sequence (GGGGS)n (SEQ ID NO: 429), where n is 9. In some cases, a linker comprises the amino acid sequence (GGGGS)n (SEQ ID NO: 430), where n is 10. In some cases, a linker comprises the amino acid sequence AAAGG (SEQ ID NO: 70).

[0263] In some cases, a linker polypeptide present in a TMAPP of the present disclosure includes a cysteine residue that can form a disulfide bond with a cysteine residue present in a second polypeptide of the TMAPP. In some cases, for example, a suitable linker comprises the amino acid sequence GCGASGGGGSGGGGS (SEQ ID NO: 71).

### Epitope-Presenting Peptides

[0264] A peptide epitope (also referred to herein as a “peptide antigen” or “epitope-presenting peptide” or “epitope”) present in a TMAPP of the present disclosure presents an epitope to a TCR on the surface of a T cell. An epitope-presenting peptide can have a length of from about 4 amino acids to about 25 amino acids, e.g., the epitope can have a length of from 4 amino acids (aa) to 10 aa, from 10 aa to 15 aa, from 15 aa to 20 aa, or from 20 aa to 25 aa. For example, an epitope present in a TMAPP of the present disclosure can have a length of 4 amino acids (aa), 5 aa, 6 aa, 7, aa, 8 aa, 9 aa, 10 aa, 11 aa, 12 aa, 13 aa, 14 aa, 15 aa, 16 aa, 17 aa, 18 aa, 19 aa, 20 aa, 21 aa, 22 aa, 23 aa, 24 aa, or 25 aa. In some cases, an epitope-presenting peptide present in a TMAPP of the present disclosure has a length of from 5 amino acids to 10 amino acids, e.g., 5 aa, 6 aa, 7 aa, 8 aa, 9 aa, or 10 aa.

[0265] An epitope-presenting peptide present in a TMAPP of the present disclosure is specifically bound by a T-cell, i.e., the epitope is specifically bound by an epitope-specific T cell. An epitope-specific T cell binds an epitope-presenting peptide having a reference amino acid sequence, but does not substantially bind an epitope that differs from the reference amino acid sequence. For example, an epitope-specific T cell binds an epitope-presenting peptide having a reference amino acid sequence, and binds an epitope that differs from the reference amino acid sequence, if at all, with an affinity that is less than 10⁻⁶ M, less than 10⁻⁵ M, or less than 10⁻⁴ M. An epitope-specific T cell can bind an epitope-presenting peptide for which it is specific with an affinity of at least 10⁻⁷ M, at least 10⁻⁸ M, at least 10⁻⁹ M, or at least 10⁻¹⁰ M.

### Cancer Epitopes

[0266] Suitable epitope-presenting peptides include, but are not limited to, epitope-presenting peptides present in a cancer-associated antigen. Cancer-associated antigens include, but are not limited to, α-folate receptor; carbonic anhydrase IX (CAIX); CD19; CD20; CD22; CD30; CD33; CD44v7/8; carcinoembryonic antigen (CEA); epithelial glycoprotein-2 (EGP-2); epithelial glycoprotein-40 (EGP-40); folate binding protein (FBP); fetal acetylcholine receptor; ganglioside antigen GD2; Her2/neu; IL-13R-a2; kappa light chain; LeY; L1 cell adhesion molecule; melanoma-associated antigen (MAGE); MAGE-A1; mesothelin; MUC1; NKG2D ligands; oncofetal antigen (h5T4); prostate stem cell antigen (PSCA); prostate-specific membrane antigen (PSMA); tumor-associate glycoprotein-72 (TAG-72); and vascular endothelial growth factor receptor-2 (VEGF-R2). See, e.g., Vigneron et al. (2013) Cancer Immunity 13:15; and Vigneron (2015) BioMed Res. Int'l Article ID 948501. In some cases, the epitope is a human papilloma virus E7 antigen epitope; see, e.g., Ramos et al. (2013) J. Immunother. 36:66.

[0267] In some cases, a suitable peptide epitope is a peptide fragment of from about 4 amino acids to about 20 amino acids (e.g., 4 amino acids (aa), 5 aa, 6 aa, 7 aa, 8 aa, 9 aa, 10 aa, 11 aa, 12 aa, 13 aa, 14 aa, 15 aa, 16 aa, 17 aa, 18 aa, 19 aa, or 20 aa) in length of a MUC1 polypeptide, a human papillomavirus (HPV) E6 polypeptide, an LMP2 polypeptide, an HPV E7 polypeptide, an epidermal growth factor receptor (EGFR) VIII polypeptide, a HER-2/neu polypeptide, a melanoma antigen family A, 3 (MAGE A3) polypeptide, a p53 polypeptide, a mutant p53 polypeptide, an NY-ESO-1 polypeptide, a folate hydrolase (prostate-specific membrane antigen; PSMA) polypeptide, a carcinoembryonic antigen (CEA) polypeptide, a melanoma antigen recognized by T-cells (melanA/MART1) polypeptide, a Ras polypeptide, a gp100 polypeptide, a proteinase3 (PR1) polypeptide, a bcr-abl polypeptide, a tyrosinase polypeptide, a survivin polypeptide, a prostate specific antigen (PSA) polypeptide, an hTERT polypeptide, a sarcoma translocation breakpoints polypeptide, a synovial sarcoma X (SSX) breakpoint polypeptide, an EphA2 polypeptide, an acid phosphatase, prostate (PAP) polypeptide, a melanoma inhibitor of apoptosis (ML-IAP) polypeptide, an alpha-fetoprotein (AFP) polypeptide, an epithelial cell adhesion molecule (EpCAM) polypeptide, an ERG (TMPRSS2 ETS fusion) polypeptide, a NA17 polypeptide, a paired-box-3 (PAX3) polypeptide, an anaplastic lymphoma kinase (ALK) polypeptide, an androgen receptor polypeptide, a cyclin B1 polypeptide, an N-myc proto-oncogene (MYCN) polypeptide, a Ras homolog gene family member C (RhoC) polypeptide, a tyrosinase-related protein-2 (TRP-2) polypeptide, a mesothelin polypeptide, a prostate stem cell antigen (PSCA) polypeptide, a melanoma associated antigen-1 (MAGE A1) polypeptide, a cytochrome P450 1B1 (CYP1B1) polypeptide, a placenta-specific protein 1 (PLAC1) polypeptide, a BORIS polypeptide (also known as CCCTC-binding factor or CTCF), an ETV6-AML polypeptide, a breast cancer antigen NY-BR-1 polypeptide (also referred to as ankyrin repeat domain-containing protein 30A), a regulator of G-protein signaling (RGS5) polypeptide, a squamous cell carcinoma antigen recognized by T-cells (SART3) polypeptide, a carbonic anhydrase IX polypeptide, a paired box-5 (PAX5) polypeptide, an OY-TES1 (testis antigen; also known as acrosin binding protein) polypeptide, a sperm protein 17 polypeptide, a lymphocyte cell-specific protein-tyrosin kinase (LCK) polypeptide, a high molecular weight melanoma associated antigen (HMW-MAA), an A-kinase anchoring protein-4 (AKAP-4), a synovial sarcoma X breakpoint 2 (SSX2) polypeptide, an X antigen family member 1 (XAGE1) polypeptide, a B7 homolog 3 (B7H3; also known as CD276) polypeptide, a legumain polypeptide (LGMN1; also known as asparaginyl endopeptidase), a tyrosine kinase with Ig and EGF homology domains-2 (Tie-2; also known as angiopoietin-1 receptor) polypeptide, a P antigen family member 4 (PAGE4) polypeptide, a vascular endothelial growth factor receptor 2 (VEGF2) polypeptide, a MAD-CT-1 polypeptide, a fibroblast activation protein (FAP) polypeptide, a platelet derived growth factor receptor beta (PDGFβ) polypeptide, a MAD-CT-2 polypeptide, a Fos-related antigen-1 (FOSL) polypeptide, and a Wilms tumor-1 (WT1) polypeptide.

[0268] Amino acid sequences of cancer-associated antigens are known in the art; see, e.g., MUC1 (GenBank CAA56734); LMP2 (GenBank CAA47024); HPV E6 (GenBank AAD33252); HPV E7 (GenBank AHG99480); EGFRvIII (GenBank NP_001333870); HER-2/neu (GenBank AAI67147); MAGE-A3 (GenBank AAH11744); p53 (GenBank BAC16799); NY-ESO-1 (GenBank CAA05908); PSMA (GenBank AAH25672); CEA (GenBank AAA51967); melan/MART1 (GenBank NP_005502); Ras (GenBank NP_001123914); gp100 (GenBank AAC60634); bcr-abl (GenBank AAB60388); tyrosinase (GenBank AAB60319); survivin (GenBank AAC51660); PSA (GenBank CAD54617); hTERT (GenBank BAC11010); SSX (GenBank NP_001265620); Eph2A (GenBank NP_004422); PAP (GenBank AAH16344); ML-IAP (GenBank AAH14475); AFP (GenBank NP_001125); EpCAM (GenBank NP_002345); ERG (TMPRSS2 ETS fusion) (GenBank ACA81385); PAX3 (GenBank AAI01301); ALK (GenBank NP_004295); androgen receptor (GenBank NP_000035); cyclin B1 (GenBank CA099273); MYCN (GenBank NP_001280157); RhoC (GenBank AAH52808); TRP-2 (GenBank AAC60627); mesothelin (GenBank AAH09272); PSCA (GenBank AAH65183); MAGE A1 (GenBank NP_004979); CYP1B1 (GenBank AAM50512); PLAC1 (GenBank AAG22596); BORIS (GenBank NP_001255969); ETV6 (GenBank NP_001978); NY-BR1 (GenBank NP_443723); SART3 (GenBank NP_055521); carbonic anhydrase IX (GenBank EAW58359); PAX5 (GenBank NP_057953); OY-TES1 (GenBank NP_115878); sperm protein 17 (GenBank AAK20878); LCK (GenBank NP_001036236); HMW-MAA (GenBank NP_001888); AKAP-4 (GenBank NP_003877); SSX2 (GenBank CAA60111); XAGE1 (GenBank NP_001091073; XP_001125834; XP_001125856; and XP_001125872); B7H3 (GenBank NP_001019907; XP_947368; XP_950958; XP_950960; XP_950962; XP_950963; XP_950965; and XP_950967); LGMN1 (GenBank NP_001008530); TIE-2 (GenBank NP_000450); PAGE4 (GenBank NP_001305806); VEGFR2 (GenBank NP_002244); MAD-CT-1 (GenBank NP_005893 NP_056215); FAP (GenBank NP_004451); PDGFβ (GenBank NP_002600); MAD-CT-2 (GenBank NP_001138574); FOSL (GenBank NP_005429); and WT-1 (GenBank NP_000369). These polypeptides are also discussed in, e.g., Cheever et al. (2009) Clin. Cancer Res. 15:5323, and references cited therein; Wagner et al. (2003) J. Cell. Sci. 116:1653; Matsui et al. (1990) Oncogene 5:249; Zhang et al. (1996) Nature 383:168.

[0269] In some cases, the epitope is HPV16E7/82-90 (LLMGTLGIV; SEQ ID NO: 404). In some cases, the epitope is HPV16E7/86-93 (TLGIVCPI; SEQ ID NO: 405). In some cases, the epitope is HPV16E7/11-20 (YMLDLQPETT; SEQ ID NO: 406). In some cases, the epitope is HPV16E7/11-19 (YMLDLQPET; SEQ ID NO: 407). See, e.g., Ressing et al. ((1995) J. Immunol. 154:5934) for additional suitable HPV epitopes.

### Self Epitopes

[0270] In some cases, the peptide epitope is an epitope associated with or present in a “self” antigen (an autoantigen). Antigens associated with autoimmune disease can be autoantigens associated with autoimmune diseases such as Addison disease (autoimmune adrenalitis, Morbus Addison), alopecia areata, Addison's anemia (Morbus Biermer), autoimmune hemolytic anemia (AIHA), autoimmune hemolytic anemia (AIHA) of the cold type (cold hemagglutinin disease, cold autoimmune hemolytic anemia (AIHA) (cold agglutinin disease), (CHAD)), autoimmune hemolytic anemia (AIHA) of the warm type (warm AIHA, warm autoimmune hemolytic anemia (AIHA)), autoimmune hemolytic Donath-Landsteiner anemia (paroxysmal cold hemoglobinuria), antiphospholipid syndrome (APS), atherosclerosis, autoimmune arthritis, arteriitis temporalis, Takayasu arteriitis (Takayasu's disease, aortic arch disease), temporal arteriitis/giant cell arteriitis, autoimmune chronic gastritis, autoimmune infertility, autoimmune inner ear disease (AIED), Basedow's disease (Morbus Basedow), Bechterew's disease (Morbus Bechterew, ankylosing spondylitis, spondylitis ankylosans), Behcet's syndrome (Morbus Behcet), bowel disease including autoimmune inflammatory bowel disease (including colitis ulcerosa (Morbus Crohn, Crohn's disease), autoimmune cardiomyopathy, idiopathic dilated cardiomyopathy (DCM), chronic fatigue immune dysfunction syndrome (CFIDS), chronic inflammatory demyelinating polyneuropathy (CIDP), chronic polyarthritis, Churg-Strauss syndrome, cicatricial pemphigoid, Cogan syndrome, CREST syndrome (syndrom with Calcinosis cutis, Raynaud phenomenon, motility disorders of the esophagus, sklerodaktylia and teleangiectasia), Crohn's disease (Morbus Crohn, colitis ulcerosa), dermatitis herpetiformis during, dermatologic autoimmune diseases, dermatomyositis, essential mixed cryoglobulinemia, essential mixed cryoglobulinemia, fibromyalgia, fibromyositis, Goodpasture syndrome (anti-GBM mediated glomerulonephritis), graft versus host disease, Guillain-Barre syndrome (GBM, Polyradikuloneuritis), hematologic autoimmune diseases, Hashimoto thyroiditis, hemophilia, acquired hemophilia, autoimmune hepatitis, idiopathic pulmonary fibrosis (IPF), idiopathic thrombocytopenic purpura, Immuno-thrombocytopenic purpura (Morbus Werlhof, ITP), IgA nephropathy, autoimmune infertility, juvenile rheumatoid arthritis (Morbus Still, Still syndrome), Lambert-Eaton syndrome, systemic lupus erythematosus (SLE), lupus erythematosus (discoid form), Lyme arthritis (Lyme disease, borrelia arthritis), Meniere's disease (Morbus Meniere); mixed connective tissue disease (MCTD), multiple sclerosis (MS, encephalomyelitis disseminate, Charcot's disease), myasthenia gravis (myasthenia, MG), myositis, polymyositis, neural autoimmune diseases, pemphigus vulgaris, bullous pemphigoid, polyglandular (autoimmune) syndrome (PGA syndrome, Schmidt's syndrome), polymyalgia rheumatica, primary agammaglobulinemia, primary autoimmune cholangitis, progressive systemic sclerosis (PSS), rheumatoid arthritis (RA, chronic polyarthritis, rheumatic disease of the joints, rheumatic fever), sarcoidosis (Morbus Boeck, Besnier-Boeck-Schaumann disease), stiff-man syndrome, Sclerodermia, Scleroderma, Sjögren's syndrome, autoimmune uveiitis, and Wegner's disease (Morbus Wegner, Wegner's granulomatosis).

[0271] In some cases, a peptide epitope present in a TMMP of the present disclosure is a peptide associated with Addison's disease, alopecia areata, ankylosing spondylitis, autoimmune encephalomyelitis, autoimmune hemolytic anemia, autoimmune hepatitis, autoimmune-associated infertility, autoimmune thrombocytopenic purpura, bullous pemphigoid, Crohn's disease, Goodpasture's syndrome, glomerulonephritis (e.g., crescentic glomerulonephritis, proliferative glomerulonephritis), Grave's disease, Hashimoto's thyroiditis, mixed connective tissue disease, multiple sclerosis, myasthenia gravis (MG), pemphigus (e.g., pemphigus vulgaris), pernicious anemia, polymyositis, psoriasis, psoriatic arthritis, rheumatoid arthritis, scleroderma, Sjögren's syndrome, systemic lupus erythematosus (SLE), vasculitis, or vitiligo.

[0272] Autoantigens include, e.g., aggrecan, alanyl-tRNA syntetase (PL-12), alpha beta crystallin, alpha fodrin (Sptan 1), alpha-actinin, α1 antichymotrypsin, α1 antitripsin, α1 microglobulin, aldolase, aminoacyl-tRNA synthetase, an amyloid, an annexin, an apolipoprotein, aquaporin, bactericidal/permeability-increasing protein (BPI), β-globin precursor BP1, β-actin, β-lactoglobulin A, β-2-glycoprotein I, β2-microglobulin, a blood group antigen, C reactive protein (CRP), calmodulin, calreticulin, cardiolipin, catalase, cathepsin B, a centromere protein, chondroitin sulfate, chromatin, collagen, a complement component, cytochrome C, cytochrome P450 2D6, cytokeratins, decorin, dermatan sulfate, DNA topoisomerase I, elastin, Epstein-Barr nuclear antigen 1 (EBNA1), elastin, entaktin, an extractable nuclear antigen, Factor I, Factor P, Factor B, Factor D, Factor H, Factor X, fibrinogen, fibronectin, formiminotransferase cyclodeaminase (LC-1), gp210 nuclear envelope protein, GP2 (major zymogen granule membrane glycoprotein), a glutenin, glycoprotein gpIIb/IIIa, glial fibrillary acidic protein (GFAP), glycated albumin, glyceraldehyde 3-phosphate dehydrogenase (GAPDH), haptoglobin A2, heat shock proteins, hemocyanin, heparin, a histone, histidyl-tRNA synthetase (Jo-1), a hordein, hyaluronidase, immunoglobulins, an integrin, interstitial retinol-binding protein 3, intrinsic factor, Ku (p70/p80), lactate dehydrogenase, laminin, liver cytosol antigen type 1 (LC1), liver/kidney microsomal antigen 1 (LKM1), lysozyme, melanoma differentiation-associated protein 5 (MDAS), Mi-2 (chromodomain helicase DNA binding protein 4), a mitochondrial protein, muscarinic receptors, myelin-associated glycoprotein, myosin, myelin basic protein, myelin proteolipid protein, myelin oligodendrocyte glycoprotein, myeloperoxidase (MPO), rheumatoid factor (IgM anti-IgG), neuron-specific enolase, nicotinic acetylcholine receptor A chain, nucleolin, a nucleoporin, nucleosome antigen, PM/Sc1100, PM/Scl 75, pancreatic β-cell antigen, pepsinogen, peroxiredoxin 1, phosphoglucose isomerase, phospholipids, phosphatidyl inositol, platelet derived growth factors, polymerase beta (POLB), potassium channel KIR4.1, proliferating cell nuclear antigen (PCNA), proteinase-3, proteolipid protein, proteoglycan, prothrombin, recoverin, rhodopsin, ribonuclease, a ribonucleoprotein, ribosomes, a ribosomal phosphoprotein, RNA, an Sm protein, Sp100 nuclear protein, SRP54 (signal recognition particle 54 kDa), a selectin, smooth muscle proteins, sphingomyelin, streptococcal antigens, superoxide dismutase, synovial joint proteins, T1F1 gamma collagen, threonyl-tRNA synthetase (PL-7), tissue transglutaminase, thyroid peroxidase, thyroglobulin, thyroid stimulating hormone receptor, transferrin, triosephosphate isomerase, tubulin, tumor necrosis factor-alpha, topoisomerase, U1-dnRNP 68/70 kDa, U1-snRNP A, U1-snRNP C, U-snRNP B/B′, ubiquitin, vascular endothelial growth factor, vimentin, and vitronectin.

[0273] The antigens/epitopes included in a TMAPP of the present disclosure are those that are useful for treating an autoimmune disease other than (or in addition to) T1D and celiac disease. Accordingly, the present disclosure encompasses only protein constructs (e.g., TMAPPs) and methods of preparing protein constructs (e.g., TMAPPs) (as well as compositions comprising such protein constructs) comprising antigens/epitopes useful for treating an autoimmune disease other than (or in addition to) celiac disease or T1D. Likewise, the present disclosure encompasses only methods of treating, and the treatment of, an autoimmune disease other than (or in addition to) T1D or celiac disease. For clarity, an TMAPP comprising an antigen/epitope that is useful for treating an autoimmune disease other than T1D and/or celiac disease is not excluded from the scope of this disclosure if it also may provide some therapeutic benefit for the treatment of T1D and/or celiac disease. Likewise, a method of treating, or treatment of, an autoimmune disease other than T1D and/or celiac disease is not excluded from the scope of this disclosure if it also may have a use as a method of treating or treatment of T1D or celiac disease.

[0274] Autoantigens associated with alopecia areata (autoimmune alopecia) include, e.g., hair follicle keratinocyte polypeptides, melanogenesis-associated autoantigens, and melanocyte polypeptides. An example of a melanocyte autoantigen is tyrosinase. Autoantigens associated with autoimmune alopecia also include trichohyalin (Leung et al. (2010) J. Proteome Res. 9:5153) and keratin 16. A suitable epitope-presenting peptide for inclusion in a TMAPP of the present disclosure can be an epitope-presenting peptide of from 4 amino acids to about 25 amino acids in length of a hair follicle keratinocyte polypeptide, a melanocyte polypeptide, a melanogenesis-associated polypeptide, tyrosinase, trichohyalin, or keratin 16.

[0275] Autoantigens associated with Addison's disease include, e.g., 21-hydroxylase. A suitable epitope-presenting peptide for inclusion in a TMAPP of the present disclosure can be an epitope-presenting peptide of from 4 amino acids to about 25 amino acids in length of 21-hydroxylase.

[0276] Autoantigens associated with autoimmune thyroiditis (Hashimoto's thyroiditis) include, e.g., thyroglobulin, thyroid peroxidase, thyroid Stimulating Hormone Receptor (TSH-Receptor), thyroidal iodide transporters Na⁺/I-symporter (NIS), pendrin, and the like. A suitable epitope-presenting peptide for inclusion in a TMAPP of the present disclosure can be an epitope-presenting peptide of from 4 amino acids to about 25 amino acids in length of any one of the aforementioned Hashimoto's thyroiditis-associated polypeptides.

[0277] Autoantigens associated with Crohn's disease include, e.g., pancreatic secretory granule membrane glycoprotein-2 (GP2). A suitable epitope-presenting peptide for inclusion in a TMAPP of the present disclosure can be an epitope-presenting peptide of from 4 amino acids to about 25 amino acids in length of GP2.

[0278] Autoantigens associated with Goodpasture's disease include, e.g., the α3 chain of type IV collagen, e.g., amino acids 135-145 of the α3 chain of type IV collagen. Penades et al. (1995) Eur. J. Biochem. 229:754; Kalluri et al. (1994) Proc. Natl. Acad. Sci. USA 91:6201. A suitable epitope-presenting peptide for inclusion in a TMAPP of the present disclosure can be an epitope-presenting peptide of from 4 amino acids to about 25 amino acids in length of the α3 chain of type IV collagen.

[0279] Autoantigens associated with Grave's disease include, for example, thyroglobulin, thyroid peroxidase, and thyrotropin receptor (TSH-R). A suitable epitope-presenting peptide for inclusion in a TMAPP of the present disclosure can be an epitope-presenting peptide of from 4 amino acids to about 25 amino acids in length of any one of the aforementioned Grave's disease-associated antigens.

[0280] Autoantigens associated with mixed connective tissue disease include, e.g., U1 ribonucleoprotein (U1-RNP) polypeptide (also known as snRNP70). Sato et al. (2010) Mol. Cell. Biochem. 106:55. A suitable epitope-presenting peptide for inclusion in a TMAPP of the present disclosure can be an epitope-presenting peptide of from 4 amino acids to about 25 amino acids in length of U1-RNP polypeptide.

[0281] Autoantigens associated with multiple sclerosis include, e.g., myelin basic protein, myelin oligodendrocyte glycoprotein, and myelin proteolipid protein. A suitable epitope-presenting peptide for inclusion in a TMAPP of the present disclosure can be an epitope-presenting peptide of from 4 amino acids to about 25 amino acids in length of any one of the aforementioned multiple sclerosis-associated antigens. As one non-limiting example, the peptide epitope can comprise the amino acid sequence ENPVVHFFKNIVTPR (SEQ ID NO: 408). In some cases, a TMAPP of the present disclosure comprises a DRB1*15:01 MHC class II β chain; and a peptide epitope of the amino acid sequence ENPVVHFFKNIVTPR (SEQ ID NO: 408).

[0282] Autoantigens associated with myasthenia gravis include, e.g., acetylcholine receptor (AchR; see, e.g., Lindstrom (2000) Muscle & Nerve 23:453), muscle-specific tyrosine kinase, and low-density lipoprotein receptor-related protein-4. A suitable epitope-presenting peptide for inclusion in a TMAPP of the present disclosure can be an epitope-presenting peptide of from 4 amino acids to about 25 amino acids in length of any one of the aforementioned myasthenia gravis-associated antigens. In some cases, a suitable epitope-presenting peptide for inclusion in a TMAPP of the present disclosure is an epitope-presenting peptide of from 4 amino acids to about 25 amino acids in length of an AchR.

[0283] Autoantigens associated with Parkinson's disease include, e.g., α-synuclein. A suitable epitope-presenting peptide for inclusion in a TMAPP of the present disclosure can be an epitope-presenting peptide of from 4 amino acids to about 25 amino acids in length of α-synuclein. For example, a suitable epitope-presenting peptide for inclusion in a TMAPP of the present disclosure includes a peptide of from 5 amino acids to the entire length of any one of the following: GKTKEGVLYVGSKTK (SEQ ID NO: 409); KTKEGVLYVGSKTKE (SEQ ID NO: 410); MPVDPDNEAYEMPSE (SEQ ID NO: 411); DNEAYEMPSEEGYQD (SEQ ID NO: 412); EMPSEEGYQDYEPE (SEQ ID NO: 413); and SEEGYQDYEPEA (SEQ ID NO: 414), where “S” denotes phosphoserine.

[0284] Autoantigens associated with pemphigus (e.g., pemphigus vulgaris, pemphigus foliaceus, bullous pemphigoid) include pemphigus vulgaris immunogens such as desmosomal cadherin desmoglein 3 (Dsg3); pemphigus foliaceus immunogens such as Dsg1; bullous pemphigoid immunogens such as hemidesmosome peptides including BP230 antigen, GPAG1a, and BPAG1b. See, e.g., Cirillo et al. (2007) Immunology 121:377. Autoantigens associated with bullous pemphigoid include bullous pemphigoid antigen 1 (BPAG1; also known as BP230 or dystonin), bullous pemphigoid antigen 2 (BPAG2; also known as BP180 or type XVII collagen), and subunits of human integrins α-5 and β-4. A suitable epitope-presenting peptide for inclusion in a TMAPP of the present disclosure can be an epitope-presenting peptide of from 4 amino acids to about 25 amino acids in length of any of the aforementioned pemphigus-associated antigens.

[0285] Autoantigens associated with myositis (e.g., polymyositis; dermatomyositis) include, e.g., histidyl tRNA synthetase. A suitable epitope-presenting peptide for inclusion in a TMAPP of the present disclosure can be an epitope-presenting peptide of from 4 amino acids to about 25 amino acids in length of histidyl tRNA synthetase.

[0286] Autoantigens associated with rheumatoid arthritis include, e.g., collagen, vimentin, aggregan, fibrinogen, cyclic citrullinated peptides, α-enolase, histone polypeptides, lactoferrin, catalase, actinin, and actins (cytoplasmic 1 and 2(β/γ). A suitable epitope-presenting peptide for inclusion in a TMAPP of the present disclosure can be an epitope-presenting peptide of from 4 amino acids to about 25 amino acids in length of any one of the aforementioned rheumatoid arthritis-associated antigens.

[0287] Autoantigens associated with scleroderma include nuclear antigens. A suitable epitope-presenting peptide for inclusion in a TMAPP of the present disclosure can be an epitope-presenting peptide of from 4 amino acids to about 25 amino acids in length of a nuclear antigen associated with scleroderma.

[0288] Autoantigens associated with Sjögren's syndrome include, e.g., Ro/La ribonucleoprotein (RNP) complex, alpha-fodrin, beta-fodrin, islet cell autoantigen, poly(ADP)ribose polymerase (PARP), nuclear mitotic apparatus (NuMA), NOR-90, Ro60 kD autoantigen, Ro52 antigen, La antigen (see, e.g., GenBank Accession No. NP_001281074.1), and p27 antigen. A suitable epitope-presenting peptide for inclusion in a TMAPP of the present disclosure can be an epitope-presenting peptide of from 4 amino acids to about 25 amino acids in length of any one of the aforementioned Sjögren's syndrome-associated antigens.

[0289] Autoantigens associated with systemic lupus erythematosus (SLE) include, e.g., Ro60 autoantigen, low-density lipoproteins, Sm antigens of the U-1 small nuclear ribonucleoprotein complex (B/B′, D1, D2, D3, E, F, G), α-actin 1, α-actin 4, annexin AI, C1q/tumor necrosis factor-related protein, catalase, defensins, chromatin, histone proteins, transketolase, hCAP18/LL37, and ribonucleoproteins (RNPs). A suitable epitope-presenting peptide for inclusion in a TMAPP of the present disclosure can be an epitope-presenting peptide of from 4 amino acids to about 25 amino acids in length of any one of the aforementioned SLE-associated antigens.

[0290] Autoantigens associated with thrombocytopenia purpura include ADAMTS13 (a disintegrin and metalloproteinase with a thrombospondin type 1 motif, member 13), and von Willebrand factor-cleaving protease (VWFCP). A suitable epitope-presenting peptide for inclusion in a TMAPP of the present disclosure can be an epitope-presenting peptide of from 4 amino acids to about 25 amino acids in length of an ADAMTS13 polypeptide or a VWFCP polypeptide.

[0291] Autoantigens associated with vasculitis include proteinase-3, lysozyme C, lactoferrin, leukocyte elastase, cathepsin G, and azurocidin. A suitable epitope-presenting peptide for inclusion in a TMAPP of the present disclosure can be an epitope-presenting peptide of from 4 amino acids to about 25 amino acids in length of any of the aforementioned vasculitis-associated antigens.

[0292] Autoantigens associated with vitiligo include SOX9, SOX10, PMEL (Premelanosomal protein), tyrosinase, TYRP1 (Tyrosine related protein 1), DDT (D-Dopachrome tautomerase), Rab38, and MCHR1 (Melanin-concentrating receptor. A suitable epitope-presenting peptide for inclusion in a TMAPP of the present disclosure can be an epitope-presenting peptide of from 4 amino acids to about 25 amino acids in length of any one of the aforementioned vitiligo-associated polypeptides.

[0293] Autoantigens associated with autoimmune uveitis include, for example, interphotoreceptor retinoid-binding protein (IRBP). A suitable epitope-presenting peptide for inclusion in a TMAPP of the present disclosure can be an epitope-presenting peptide of from 4 amino acids to about 25 amino acids in length IRBP. A suitable epitope-presenting peptide for inclusion in a TMAPP of the present disclosure can be an epitope-presenting peptide of from 4 amino acids to about 25 amino acids in length of any one of the aforementioned antigens.

[0294] Autoantigens associated with autoimmune polyendocrine syndrome include, e.g., 17-alpha hydroxylase, histidine decarboxylase, tryptophan hydroxylase, and tyrosine hydroxylase. A suitable epitope-presenting peptide for inclusion in a TMAPP of the present disclosure can be an epitope-presenting peptide of from 4 amino acids to about 25 amino acids in length of any one of the aforementioned autoimmune polyendocrine syndrome-associated antigens.

[0295] Autoantigens associated with psoriasis include ADAMTS15. See, e.g., Prinz (2017) Autoimmunity Reviews 16:970. A suitable epitope-presenting peptide for inclusion in a TMAPP of the present disclosure can be an epitope-presenting peptide of from 4 amino acids to about 25 amino acids in length of an ADAMTS15 polypeptide.

### Immunomodulatory Polypeptides (“MODs”)

[0296] Immunomodulatory polypeptides that are suitable for inclusion in a TMAPP of the present disclosure include, but are not limited to, IL-2, CD7, B7-1 (CD80), B7-2 (CD86), PD-L1, PD-L2, 4-1BBL, OX40L, Fas ligand (FasL), inducible costimulatory ligand (ICOS-L), intercellular adhesion molecule (ICAM), CD30L, CD40, CD70, CD83, HLA-G, MICA, MICB, HVEM, lymphotoxin beta receptor, 3/TR6, ILT3, and ILT4.

[0297] Examples of immunomodulatory polypeptides (MOD) suitable for inclusion in a TMAPP of the present disclosure, and their cognate costimulatory receptors (also referred to herein as “co-immunomodulatory polypeptides” or “coMODs”) include the following:

[0298] a) 4-1BBL (MOD) and 4-1BB (Co-MOD);

[0299] b) PD-L1 (MOD) and PD1 (Co-MOD);

[0300] c) IL-2 (MOD) and IL-2 receptor (Co-MOD);

[0301] d) CD80 (MOD) and CD28 (Co-MOD);

[0302] e) CD86 (MOD) and CD28 (Co-MOD);

[0303] f) OX40L (CD252) (MOD) and OX40 (CD134) (Co-MOD);

[0304] g) Fas ligand (FasL) (MOD) and Fas (Co-MOD);

[0305] h) ICOS-L (MOD) and ICOS (Co-MOD);

[0306] i) ICAM (MOD) and LFA-1 (Co-MOD);

[0307] j) CD30L (MOD) and CD30 (Co-MOD);

[0308] k) CD40 (MOD) and CD40L (Co-MOD);

[0309] l) CD83 (MOD) and CD83L (Co-MOD);

[0310] m) HVEM (CD270) (MOD) and CD160 (Co-MOD);

[0311] n) JAG1 (CD339) (MOD) and Notch (Co-MOD);

[0312] o) JAG1 (CD339) (MOD) and CD46 (Co-MOD);

[0313] p) CD70 (MOD) and CD27 (Co-MOD);

[0314] q) CD80 (MOD) and CTLA4 (Co-MOD);

[0315] r) CD86 (MOD) and CTLA4 (Co-MOD); and

[0316] s) TGF-β1, TGF-β2, and/or TGF-β3 (MODs) and TGF-β Receptor (e.g., TGFBR1 and/or TGFBR2) (Co-MOD).

[0317] In some cases, the immunomodulatory polypeptide is selected from a 4-1BBL polypeptide, a B7-1 polypeptide; a B7-2 polypeptide, an ICOS-L polypeptide, an OX-40L polypeptide, a CD80 polypeptide, a CD86 polypeptide, a PD-L1 polypeptide, a FasL polypeptide, a TGFβ polypeptide, and a PD-L2 polypeptide. The immunomodulatory polypeptide can comprise only the extracellular portion of a full-length immunomodulatory polypeptide. Thus, for example, the immunomodulatory polypeptide can in some cases exclude one or more of a signal peptide, a transmembrane domain, and an intracellular domain normally found in a naturally-occurring immunomodulatory polypeptide.

[0318] In some cases, an immunomodulatory polypeptide suitable for inclusion in a TMAPP of the present disclosure comprises all or a portion of (e.g., an extracellular portion of) the amino acid sequence of a naturally-occurring immunomodulatory polypeptide. In other instances, an immunomodulatory polypeptide suitable for inclusion in a TMAPP of the present disclosure is a variant immunomodulatory polypeptide that comprises at least one amino acid substitution compared to the amino acid sequence of a naturally-occurring immunomodulatory polypeptide. In some instances, a variant immunomodulatory polypeptide exhibits a binding affinity for a co-immunomodulatory polypeptide that is lower than the affinity of a corresponding naturally-occurring immunomodulatory polypeptide (e.g., an immunomodulatory polypeptide not comprising the amino acid substitution(s) present in the variant) for the co-immunomodulatory polypeptide.

Variant Immunomodulatory Polypeptides with Reduced Affinity

[0319] Suitable immunomodulatory domains that exhibit reduced affinity for a co-immunomodulatory domain can have from 1 amino acid (aa) to 20 aa differences from a wild-type immunomodulatory domain For example, in some cases, a variant immunomodulatory polypeptide present in a TMAPP of the present disclosure differs in amino acid sequence by 1 aa, 2 aa, 3 aa, 4 aa, 5 aa, 6 aa, 7 aa, 8 aa, 9 aa, or 10 aa, from a corresponding wild-type immunomodulatory polypeptide. As another example, in some cases, a variant immunomodulatory polypeptide present in a TMAPP of the present disclosure differs in amino acid sequence by 11 aa, 12 aa, 13 aa, 14 aa, 15 aa, 16 aa, 17 aa, 18 aa, 19 aa, or 20 aa, from a corresponding wild-type immunomodulatory polypeptide. As an example, in some cases, a variant immunomodulatory polypeptide present in a TMAPP of the present disclosure includes 1, 2, 3, 4, 5, 6, 7, 8, 9, or 10 amino acid substitutions, compared to a corresponding reference (e.g., wild-type) immunomodulatory polypeptide. In some cases, a variant immunomodulatory polypeptide present in a TMAPP of the present disclosure includes a single amino acid substitution compared to a corresponding reference (e.g., wild-type) immunomodulatory polypeptide. In some cases, a variant immunomodulatory polypeptide present in a TMAPP of the present disclosure includes 2 amino acid substitutions (e.g., no more than 2 amino acid substitutions) compared to a corresponding reference (e.g., wild-type) immunomodulatory polypeptide. In some cases, a variant immunomodulatory polypeptide present in a TMAPP of the present disclosure includes 3 amino acid substitutions (e.g., no more than 3 amino acid substitutions) compared to a corresponding reference (e.g., wild-type) immunomodulatory polypeptide. In some cases, a variant immunomodulatory polypeptide present in a TMAPP of the present disclosure includes 4 amino acid substitutions (e.g., no more than 4 amino acid substitutions) compared to a corresponding reference (e.g., wild-type) immunomodulatory polypeptide. In some cases, a variant immunomodulatory polypeptide present in a TMAPP of the present disclosure includes 5 amino acid substitutions (e.g., no more than 5 amino acid substitutions) compared to a corresponding reference (e.g., wild-type) immunomodulatory polypeptide. In some cases, a variant immunomodulatory polypeptide present in a TMAPP of the present disclosure includes 6 amino acid substitutions (e.g., no more than 6 amino acid substitutions) compared to a corresponding reference (e.g., wild-type) immunomodulatory polypeptide. In some cases, a variant immunomodulatory polypeptide present in a TMAPP of the present disclosure includes 7 amino acid substitutions (e.g., no more than 7 amino acid substitutions) compared to a corresponding reference (e.g., wild-type) immunomodulatory polypeptide. In some cases, a variant immunomodulatory polypeptide present in a TMAPP of the present disclosure includes 8 amino acid substitutions (e.g., no more than 8 amino acid substitutions) compared to a corresponding reference (e.g., wild-type) immunomodulatory polypeptide. In some cases, a variant immunomodulatory polypeptide present in a TMAPP of the present disclosure includes 9 amino acid substitutions (e.g., no more than 9 amino acid substitutions) compared to a corresponding reference (e.g., wild-type) immunomodulatory polypeptide. In some cases, a variant immunomodulatory polypeptide present in a TMAPP of the present disclosure includes 10 amino acid substitutions (e.g., no more than 10 amino acid substitutions) compared to a corresponding reference (e.g., wild-type) immunomodulatory polypeptide.

[0320] In some cases, a variant immunomodulatory polypeptide present in a TMAPP of the present disclosure includes 11 amino acid substitutions (e.g., no more than 11 amino acid substitutions) compared to a corresponding reference (e.g., wild-type) immunomodulatory polypeptide. In some cases, a variant immunomodulatory polypeptide present in a TMAPP of the present disclosure includes 12 amino acid substitutions (e.g., no more than 12 amino acid substitutions) compared to a corresponding reference (e.g., wild-type) immunomodulatory polypeptide. In some cases, a variant immunomodulatory polypeptide present in a TMAPP of the present disclosure includes 13 amino acid substitutions (e.g., no more than 13 amino acid substitutions) compared to a corresponding reference (e.g., wild-type) immunomodulatory polypeptide. In some cases, a variant immunomodulatory polypeptide present in a TMAPP of the present disclosure includes 14 amino acid substitutions (e.g., no more than 14 amino acid substitutions) compared to a corresponding reference (e.g., wild-type) immunomodulatory polypeptide. In some cases, a variant immunomodulatory polypeptide present in a TMAPP of the present disclosure includes 15 amino acid substitutions (e.g., no more than 15 amino acid substitutions) compared to a corresponding reference (e.g., wild-type) immunomodulatory polypeptide. In some cases, a variant immunomodulatory polypeptide present in a TMAPP of the present disclosure includes 16 amino acid substitutions (e.g., no more than 16 amino acid substitutions) compared to a corresponding reference (e.g., wild-type) immunomodulatory polypeptide. In some cases, a variant immunomodulatory polypeptide present in a TMAPP of the present disclosure includes 17 amino acid substitutions (e.g., no more than 17 amino acid substitutions) compared to a corresponding reference (e.g., wild-type) immunomodulatory polypeptide. In some cases, a variant immunomodulatory polypeptide present in a TMAPP of the present disclosure includes 18 amino acid substitutions (e.g., no more than 18 amino acid substitutions) compared to a corresponding reference (e.g., wild-type) immunomodulatory polypeptide. In some cases, a variant immunomodulatory polypeptide present in a TMAPP of the present disclosure includes 19 amino acid substitutions (e.g., no more than 19 amino acid substitutions) compared to a corresponding reference (e.g., wild-type) immunomodulatory polypeptide. In some cases, a variant immunomodulatory polypeptide present in a TMAPP of the present disclosure includes 20 amino acid substitutions (e.g., no more than 20 amino acid substitutions) compared to a corresponding reference (e.g., wild-type) immunomodulatory polypeptide.

[0321] As discussed above, a variant immunomodulatory polypeptide suitable for inclusion in a TMAPP of the present disclosure exhibits reduced affinity for a cognate co-immunomodulatory polypeptide, compared to the affinity of a corresponding wild-type immunomodulatory polypeptide for the cognate co-immunomodulatory polypeptide.

[0322] Exemplary pairs of immunomodulatory polypeptide and cognate co-immunomodulatory polypeptide include, but are not limited to:

[0323] a) 4-1BBL (immunomodulatory polypeptide) and 4-1BB (cognate co-immunomodulatory polypeptide);

[0324] b) PD-L1 (immunomodulatory polypeptide) and PD1 (cognate co-immunomodulatory polypeptide);

[0325] c) IL-2 (immunomodulatory polypeptide) and IL-2 receptor (cognate co-immunomodulatory polypeptide);

[0326] d) CD80 (immunomodulatory polypeptide) and CD28 (cognate co-immunomodulatory polypeptide);

[0327] e) CD86 (immunomodulatory polypeptide) and CD28 (cognate co-immunomodulatory polypeptide);

[0328] f) OX40L (CD252) (immunomodulatory polypeptide) and OX40 (CD134) (cognate co-immunomodulatory polypeptide);

[0329] g) Fas ligand (immunomodulatory polypeptide) and Fas (cognate co-immunomodulatory polypeptide);

[0330] h) ICOS-L (immunomodulatory polypeptide) and ICOS (cognate co-immunomodulatory polypeptide);

[0331] i) ICAM (immunomodulatory polypeptide) and LFA-1 (cognate co-immunomodulatory polypeptide);

[0332] j) CD30L (immunomodulatory polypeptide) and CD30 (cognate co-immunomodulatory polypeptide);

[0333] k) CD40 (immunomodulatory polypeptide) and CD40L (cognate co-immunomodulatory polypeptide);

[0334] l) CD83 (immunomodulatory polypeptide) and CD83L (cognate co-immunomodulatory polypeptide);

[0335] m) HVEM (CD270) (immunomodulatory polypeptide) and CD160 (cognate co-immunomodulatory polypeptide);

[0336] n) JAG1 (CD339) (immunomodulatory polypeptide) and Notch (cognate co-immunomodulatory polypeptide);

[0337] o) JAG1 (immunomodulatory polypeptide) and CD46 (cognate co-immunomodulatory polypeptide);

[0338] p) CD80 (immunomodulatory polypeptide) and CTLA4 (cognate co-immunomodulatory polypeptide);

[0339] q) CD86 (immunomodulatory polypeptide) and CTLA4 (cognate co-immunomodulatory polypeptide); and

[0340] r) CD70 (immunomodulatory polypeptide) and CD27 (cognate co-immunomodulatory polypeptide).

[0341] In some cases, a variant immunomodulatory polypeptide present in a TMAPP of the present disclosure has a binding affinity for a cognate co-immunomodulatory polypeptide that is from 100 nM to 100 μM. For example, in some cases, a variant immunomodulatory polypeptide present in a TMAPP of the present disclosure has a binding affinity for a cognate co-immunomodulatory polypeptide that is from about 100 nM to 150 nM, from about 150 nM to about 200 nM, from about 200 nM to about 250 nM, from about 250 nM to about 300 nM, from about 300 nM to about 350 nM, from about 350 nM to about 400 nM, from about 400 nM to about 500 nM, from about 500 nM to about 600 nM, from about 600 nM to about 700 nM, from about 700 nM to about 800 nM, from about 800 nM to about 900 nM, from about 900 nM to about 1 μM, to about 1 μM to about 5 μM, from about 5 μM to about 10 μM, from about 10 μM to about 15 μM, from about 15 μM to about 20 μM, from about 20 μM to about 25 μM, from about 25 μM to about 50 μM, from about 50 μM to about 75 μM, or from about 75 μM to about 100 μM.

### Determining Binding Affinity

[0342] Binding affinity between an immunomodulatory polypeptide and its cognate co-immunomodulatory polypeptide can be determined by bio-layer interferometry (BLI) using purified immunomodulatory polypeptide and purified cognate co-immunomodulatory polypeptide. Binding affinity between a TMAPP and its cognate co-immunomodulatory polypeptide can also be determined by BLI using purified TMAPP and the cognate co-immunomodulatory polypeptide. BLI methods are well known to those skilled in the art. See, e.g., Lad et al. (2015) J. Biomol. Screen. 20(4):498-507; and Shah and Duncan (2014) J. Vis. Exp. 18:e51383. The specific and relative binding affinities described in this disclosure between an immunomodulatory polypeptide and its cognate co-immunomodulatory polypeptide, or between a synTac and its cognate co-immunomodulatory polypeptide, can be determined using the following procedures.

[0343] To determine binding affinity between a TMAPP and its cognate co-immunomodulatory polypeptide, a BLI assay can be carried out using an Octet RED 96 (Pal FortéBio) instrument, or a similar instrument, as follows. A TMAPP (e.g., a TMAPP of the present disclosure; a control TMAPP (where a control TMAPP comprises a wild-type immunomodulatory polypeptide)) is immobilized onto an insoluble support (a “biosensor”). The immobilized TMAPP is the “target.” Immobilization can be effected by immobilizing a capture antibody onto the insoluble support, where the capture antibody immobilizes the TMAPP. For example, immobilization can be effected by immobilizing anti-Fc (e.g., anti-human IgG Fc) antibodies onto the insoluble support, where the immobilized anti-Fc antibodies bind to and immobilize the TMAPP (where the TMAPP comprises an IgFc polypeptide). A co-immunomodulatory polypeptide is applied, at several different concentrations, to the immobilized TMAPP, and the instrument's response recorded. Assays are conducted in a liquid medium comprising 25 mM HEPES pH 6.8, 5% poly(ethylene glycol) 6000, 50 mM KCl, 0.1% bovine serum albumin, and 0.02% Tween 20 nonionic detergent. Binding of the co-immunomodulatory polypeptide to the immobilized TMAPP is conducted at 30° C. As a positive control for binding affinity, an anti-MHC Class II monoclonal antibody can be used. For example, an anti-HLD-DR3 monoclonal antibody such as the 16-23 antibody (Sigma; also referred to as “16.23”; see, e.g., Pious et al. (1985) J. Exp. Med. 162:1193; Mellins et al. (1991) J. Exp. Med. 174:1607; ECACC hybridoma collection 16-23, ECACC 99043001) can be used as a positive control for binding affinity. As another example, a pan-HLA Class II antibody, such as the HKB1 antibody (Immunotools; Holte et al. (1989) Eur. J. Immunol. 19:1221) can be used as a positive control for binding affinity. A standard curve can be generated using serial dilutions of the anti-MHC Class II monoclonal antibody. The co-immunomodulatory polypeptide, or the anti-MHC Class II mAb, is the “analyte.” BLI analyzes the interference pattern of white light reflected from two surfaces: i) from the immobilized polypeptide (“target”); and ii) an internal reference layer. A change in the number of molecules (“analyte”; e.g., co-immunomodulatory polypeptide; anti-HLA antibody) bound to the biosensor tip causes a shift in the interference pattern; this shift in interference pattern can be measured in real time. The two kinetic terms that describe the affinity of the target/analyte interaction are the association constant (kₐ) and dissociation constant (k_{d}). The ratio of these two terms (k_{d/a}) gives rise to the affinity constant K_{D}.

[0344] As noted above, determining binding affinity between an immunomodulatory polypeptide (e.g., IL-2 or an IL-2 variant) and its cognate co-immunomodulatory polypeptide (e.g., IL-2R) also can be determined by BLI. The assay is similar to that described above for the TMAPP. A BLI assay can be carried out using an Octet RED 96 (Pal FortéBio) instrument, or a similar instrument, as follows. A component immunomodulatory polypeptide of a TMAPP of the present disclosure (e.g., a variant IL-2 polypeptide of the present disclosure); and a control immunomodulatory polypeptide (where a control immunomodulatory polypeptide comprises a wild-type immunomodulatory polypeptide, e.g. wild-type IL-2)) are immobilized onto an insoluble support (a “biosensor”). The immunomodulatory polypeptide is the “target.” Immobilization can be effected by immobilizing a capture antibody onto the insoluble support, where the capture antibody immobilizes the immunomodulatory polypeptide. For example, if the target is fused to an immuno-affinity tag (e.g. FLAG, human IgG Fc) immobilization can be effected by immobilizing with the appropriate antibody to the immuno-affinity tag (e.g. anti-human IgG Fc) onto the insoluble support, where the immobilized antibodies bind to and immobilize the immunomodulatory polypeptide (where the immunomodulatory polypeptide comprises an IgFc polypeptide). A co-immunomodulatory polypeptide (or polypeptides) is applied, at several different concentrations, to the immobilized immunomodulatory polypeptide, and the instrument's response recorded. Alternatively, a co-immunomodulatory polypeptide (or polypeptides) is immobilized to the biosensor (e.g., for the IL-2 receptor heterotrimer, as a monomeric subunit, heterodimeric subcomplex, or the complete heterotrimer) and the immunomodulatory polypeptide is applied, at several different concentrations, to the immobilized coimmunomodulatory polypeptide(s), and the instrument's response is recorded. Assays are conducted in a liquid medium comprising 25 mM HEPES pH 6.8, 5% poly(ethylene glycol) 6000, 50 mM KCl, 0.1% bovine serum albumin, and 0.02% Tween 20 nonionic detergent. Binding of the co-immunomodulatory polypeptide to the immobilized immunomodulatory polypeptide is conducted at 30° C. BLI analyzes the interference pattern of white light reflected from two surfaces: i) from the immobilized polypeptide (“target”); and ii) an internal reference layer. A change in the number of molecules (“analyte”; e.g., co-immunomodulatory polypeptide) bound to the biosensor tip causes a shift in the interference pattern; this shift in interference pattern can be measured in real time. The two kinetic terms that describe the affinity of the target/analyte interaction are the association constant (kₐ) and dissociation constant (k_{d}). The ratio of these two terms (k_{d/a}) gives rise to the affinity constant K_{D}. Determining the binding affinity of both a wild-type immunomodulatory polypeptide (e.g., IL-2) for its receptor (e.g., IL-2R) and a variant immunomodulatory polypeptide (e.g., an IL-2 variant as disclosed herein) for its cognate co-immunomodulatory polypeptide (e.g., its receptor) (e.g., IL-2R) thus allows one to determine the relative binding affinity of the variant co-immunomodulatory polypeptide, as compared to the wild-type co-immunomodulatory polypeptide, for the cognate co-immunomodulatory polypeptide. That is, one can determine whether the binding affinity of a variant immunomodulatory polypeptide for its receptor (its cognate co-immunomodulatory polypeptide) is reduced as compared to the binding affinity of the wild-type immunomodulatory polypeptide for the same cognate co-immunomodulatory polypeptide, and, if so, what is the percentage reduction from the binding affinity of the wild-type co-immunomodulatory polypeptide.

[0345] The BLI assay is carried out in a multi-well plate. To run the assay, the plate layout is defined, the assay steps are defined, and biosensors are assigned in Octet Data Acquisition software. The biosensor assembly is hydrated. The hydrated biosensor assembly and the assay plate are equilibrated for 10 minutes on the Octet instrument. Once the data are acquired, the acquired data are loaded into the Octet Data Analysis software. The data are processed in the Processing window by specifying method for reference subtraction, y-axis alignment, inter-step correction, and Savitzky-Golay filtering. Data are analyzed in the Analysis window by specifying steps to analyze (Association and Dissociation), selecting curve fit model (1:1), fitting method (global), and window of interest (in seconds). The quality of fit is evaluated. K_{D} values for each data trace (analyte concentration) can be averaged if within a 3-fold range. K_{D} error values should be within one order of magnitude of the affinity constant values; R² values should be above 0.95. See, e.g., Abdiche et al. (2008) J. Anal. Biochem. 377:209.

[0346] In some cases, the ratio of: i) the binding affinity of a control TMAPP (where the control TMAPP comprises a wild-type immunomodulatory polypeptide) to a cognate co-immunomodulatory polypeptide to ii) the binding affinity of a TMAPP of the present disclosure comprising a variant of the wild-type immunomodulatory polypeptide to the cognate co-immunomodulatory polypeptide, when measured by BLI (as described above), is at least 1.5:1, at least 2:1, at least 5:1, at least 10:1, at least 15:1, at least 20:1, at least 25:1, at least 50:1, at least 100:1, at least 500:1, at least 10²:1, at least 5×10²:1, at least 10³:1, at least 5×10³:1, at least 10⁴:1, at least 10⁵:1, or at least 10⁶:1. In some cases, the ratio of: i) the binding affinity of a control TMAPP (where the control TMAPP comprises a wild-type immunomodulatory polypeptide) to a cognate co-immunomodulatory polypeptide to ii) the binding affinity of a TMAPP of the present disclosure comprising a variant of the wild-type immunomodulatory polypeptide to the cognate co-immunomodulatory polypeptide, when measured by BLI, is in a range of from 1.5:1 to 10⁶:1, e.g., from 1.5:1 to 10:1, from 10:1 to 50:1, from 50:1 to 10²:1, from 10²:1 to 10³:1, from 10³:1 to 10⁴:1, from 10⁴:1 to 10⁵:1, or from 10⁵:1 to 10⁶:1.

[0347] The epitope present in a TMAPP of the present disclosure binds to a T-cell receptor (TCR) on a T cell with an affinity of at least 100 μM (e.g., at least 10 μM, at least 1 μM, at least 100 nM, at least 10 nM, or at least 1 nM). In some cases, the epitope present in a TMAPP of the present disclosure binds to a TCR on a T cell with an affinity of from about 10⁻⁴M to about 5×10⁻⁴ M, from about 5×10⁻⁴M to about 10⁻⁵ M, from about 10⁻⁵ M to 5×10⁻⁵ M, from about 5×10⁻⁵ M to 10⁻⁶ M, from about 10⁻⁶ M to about 5×10⁻⁶ M, from about 5×10⁻⁶ M to about 10⁻⁷ M, from about 10⁻⁷ M to about 5×10⁻⁷M, from about 5×10⁻⁷ M to about 10⁻⁸M, or from about 10⁻⁸ M to about 10⁻⁹ M. Expressed another way, in some cases, the epitope present in a TMAPP of the present disclosure binds to a TCR on a T cell with an affinity of from about 1 nM to about 5 nM, from about 5 nM to about 10 nM, from about 10 nM to about 50 nM, from about 50 nM to about 100 nM, from about 0.1 μM to about 0.5 μM, from about 0.5 μM to about 1 μM, from about 1 μM to about 5 μM, from about 5 μM to about 10 μM, from about 10 μM to about 25 μM, from about 25 μM to about 50 μM, from about 50 μM to about 75 μM, from about 75 μM to about 100 μM.

[0348] In some cases, a variant immunomodulatory polypeptide present in a TMAPP of the present disclosure has a binding affinity for a cognate co-immunomodulatory polypeptide that is from 1 nM to 100 nM, or from 100 nM to 100 μM. For example, in some cases, a variant immunomodulatory polypeptide present in a TMAPP of the present disclosure has a binding affinity for a cognate co-immunomodulatory polypeptide that is from about 100 nM to 150 nM, from about 150 nM to about 200 nM, from about 200 nM to about 250 nM, from about 250 nM to about 300 nM, from about 300 nM to about 350 nM, from about 350 nM to about 400 nM, from about 400 nM to about 500 nM, from about 500 nM to about 600 nM, from about 600 nM to about 700 nM, from about 700 nM to about 800 nM, from about 800 nM to about 900 nM, from about 900 nM to about 1 μM, to about 1 μM to about 5 μM, from about 5 μM to about 10 μM, from about 10 μM to about 15 μM, from about 15 μM to about 20 μM, from about 20 μM to about 25 μM, from about 25 μM to about 50 μM, from about 50 μM to about 75 μM, or from about 75 μM to about 100 μM. In some cases, a variant immunomodulatory polypeptide present in a TMAPP of the present disclosure has a binding affinity for a cognate co-immunomodulatory polypeptide that is from about 1 nM to about 5 nM, from about 5 nM to about 10 nM, from about 10 nM to about 50 nM, from about 50 nM to about 100 nM.

### PD-L1 Variants

[0349] As one non-limiting example, in some cases, a variant immunomodulatory polypeptide present in a TMAPP of the present disclosure is a variant PD-L1 polypeptide. Wild-type PD-L1 binds to PD1.

[0350] A wild-type human PD-L1 polypeptide can comprise the following amino acid sequence:

(SEQ ID NO: 103)
MRIFAVFIFM TYWHLLNAFT VTVPKDLYVV EYGSNMTIEC
KFPVEKQLDL AALIVYWEME DKNIIQFVHG EEDLKVQHSS
YRQRARLLKD QLSLGNAALQ ITDVKLQDAG VYRCMISYGG
ADYKRITVKV NAPYNKINQR ILVVDPVTSE HELTCQAEGY
PKAEVIWTSS DHQVLSGKTT TTNSKREEKL FNVTSTLRIN
TTTNEIEYCT ERRLDPEENH TAELVIPGNI LNVSIKICLT
LSPST.

[0351] A wild-type human PD-L1 ectodomain can comprise the following amino acid sequence:

(SEQ ID NO: 104)
FT VTVPKDLYVV EYGSNMTIEC KFPVEKQLDL AALIVYWEME
DKNIIQFVHG EEDLKVQHSS YRQRARLLKD QLSLGNAALQ
ITDVKLQDAG VYRCMISYGG ADYKRITVKV NAPYNKINQR
ILVVDPVTSE HELTCQAEGY PKAEVIWTSS DHQVLSGKTT
TTNSKREEKL FNVTSTLRIN TTTNEIFYCT FRRLDPEENH
TAELVIPGNI LNVSIKI.

[0352] A wild-type PD-1 polypeptide can comprise the following amino acid sequence:

(SEQ ID NO: 105)
PGWFLDSPDR PWNPPTFSPA LLVVTEGDNA TFTCSFSNTS
ESFVLNWYRM SPSNQTDKLA AFPEDRSQPG QDCRFRVTQL
PNGRDFHMSV VRARRNDSGT YLCGAISLAP KAQIKESLRA
ELRVTERRAE VPTAHPSPSP RPAGQFQTLV VGVVGGLLGS
LVLLVWVLAV ICSRAARGTI GARRTGQPLK EDPSAVPVFS
VDYGELDFQW REKTPEPPVP CVPEQTEYAT IVFPSGMGTS
SPARRGSADG PRSAQPLRPE DGHCSWPL.

[0353] In some cases, a variant PD-L1 polypeptide exhibits reduced binding affinity to PD-1 (e.g., a PD-1 polypeptide comprising the amino acid sequence set forth in SEQ ID NO: 105), compared to the binding affinity of a PD-L1 polypeptide comprising the amino acid sequence set forth in SEQ ID NO: 103 or SEQ ID NO: 104. For example, in some cases, a variant PD-L1 polypeptide of the present disclosure binds PD-1 (e.g., a PD-1 polypeptide comprising the amino acid sequence set forth in SEQ ID NO: 105) with a binding affinity that is at least 10% less, at least 15% less, at least 20% less, at least 25% less, at least 30% less, at least 35% less, at least 40% less, at least 45% less, at least 50% less, at least 55% less, at least 60% less, at least 65% less, at least 70% less, at least 75% less, at least 80% less, at least 85% less, at least 90% less, at least 95% less, or more than 95% less, than the binding affinity of a PD-L1 polypeptide comprising the amino acid sequence set forth in SEQ ID NO: 103 or SEQ ID NO: 104.

[0354] In some cases, a variant PD-L1 polypeptide has a binding affinity to PD-1 that is from 1 nM to 1 mM. In some cases, a variant PD-L1 polypeptide of the present disclosure has a binding affinity to PD-1 that is from 100 nM to 100 μM. As another example, in some cases, a variant PD-L1 polypeptide has a binding affinity for PD1 (e.g., a PD1 polypeptide comprising the amino acid sequence set forth in SEQ ID NO: 105) that is from about 100 nM to 150 nM, from about 150 nM to about 200 nM, from about 200 nM to about 250 nM, from about 250 nM to about 300 nM, from about 300 nM to about 350 nM, from about 350 nM to about 400 nM, from about 400 nM to about 500 nM, from about 500 nM to about 600 nM, from about 600 nM to about 700 nM, from about 700 nM to about 800 nM, from about 800 nM to about 900 nM, from about 900 nM to about 1 μM, to about 1 μM to about 5 μM, from about 5 μM to about 10 μM, from about 10 μM to about 15 μM, from about 15 μM to about 20 μM, from about 20 μM to about 25 μM, from about 25 μM to about 50 μM, from about 50 μM to about 75 μM, or from about 75 μM to about 100 μM.

[0355] In some cases, a variant PD-L1 polypeptide has a single amino acid substitution compared to the PD-L1 amino acid sequence set forth in SEQ ID NO: 103 or SEQ ID NO: 104. In some cases, a variant PD-L1 polypeptide has from 2 to 10 amino acid substitutions compared to the PD-L1 amino acid sequence set forth in SEQ ID NO: 103 or SEQ ID NO: 104. In some cases, a variant PD-L1 polypeptide has 2 amino acid substitutions compared to the PD-L1 amino acid sequence set forth in SEQ ID NO: 103 or SEQ ID NO: 104. In some cases, a variant PD-L1 polypeptide has 3 amino acid substitutions compared to the PD-L1 amino acid sequence set forth in SEQ ID NO: 103 or SEQ ID NO: 104. In some cases, a variant PD-L1 polypeptide has 4 amino acid substitutions compared to the PD-L1 amino acid sequence set forth in SEQ ID NO: 103 or SEQ ID NO: 104. In some cases, a variant PD-L1 polypeptide has 5 amino acid substitutions compared to the PD-L1 amino acid sequence set forth in SEQ ID NO: 103 or SEQ ID NO: 104. In some cases, a variant PD-L1 polypeptide has 6 amino acid substitutions compared to the PD-L1 amino acid sequence set forth in SEQ ID NO: 103 or SEQ ID NO: 104. In some cases, a variant PD-L1 polypeptide has 7 amino acid substitutions compared to the PD-L1 amino acid sequence set forth in SEQ ID NO: 103 or SEQ ID NO: 104. In some cases, a variant PD-L1 polypeptide has 8 amino acid substitutions compared to the PD-L1 amino acid sequence set forth in SEQ ID NO: 103 or SEQ ID NO: 104. In some cases, a variant PD-L1 polypeptide has 9 amino acid substitutions compared to the PD-L1 amino acid sequence set forth in SEQ ID NO: 103 or SEQ ID NO: 104. In some cases, a variant PD-L1 polypeptide has 10 amino acid substitutions compared to the PD-L1 amino acid sequence set forth in SEQ ID NO: 103 or SEQ ID NO: 104.

[0356] A suitable PD-L1 variant includes a polypeptide that comprises an amino acid sequence having at least 90%, at least 95%, at least 98%, at least 99%, or 100%, amino acid sequence identity to the following amino acid sequence:

[0357] FT VTVPKXLYVV EYGSNMTIEC KFPVEKQLDL AALIVYWEME DKNIIQFVHG EEDLKVQHSS YRQRARLLKD QLSLGNAALQ ITDVKLQDAG VYRCMISYGG ADYKRITVKV NAPYNKINQR ILVVDPVTSE HELTCQAEGY PKAEVIWTSS DHQVLSGKTT TTNSKREEKL FNVTSTLRIN TTTNEIFYCT FRRLDPEENH TAELVIPGNI LNVSIKI (SEQ ID NO: 106), where X is any amino acid other than Asp. In some cases, X is Ala. In some cases, X is Arg.

[0358] A suitable PD-L1 variant includes a polypeptide that comprises an amino acid sequence having at least 90%, at least 95%, at least 98%, at least 99%, or 100%, amino acid sequence identity to the following amino acid sequence:

[0359] FT VTVPKDLYVV EYGSNMTIEC KFPVEKQLDL AALXVYWEME DKNIIQFVHG EEDLKVQHSS YRQRARLLKD QLSLGNAALQ ITDVKLQDAG VYRCMISYGG ADYKRITVKV NAPYNKINQR ILVVDPVTSE HELTCQAEGY PKAEVIWTSS DHQVLSGKTT TTNSKREEKL FNVTSTLRIN TTTNEIFYCT FRRLDPEENH TAELVIPGNI LNVSIKI (SEQ ID NO: 107), where X is any amino acid other than Ile. In some cases, X is Asp.

[0360] A suitable PD-L1 variant includes a polypeptide that comprises an amino acid sequence having at least 90%, at least 95%, at least 98%, at least 99%, or 100%, amino acid sequence identity to the following amino acid sequence:

[0361] FT VTVPKDLYVV EYGSNMTIEC KFPVEKQLDL AALIVYWEME DKNIIQFVHG EXDLKVQHSS YRQRARLLKD QLSLGNAALQ ITDVKLQDAG VYRCMISYGG ADYKRITVKV NAPYNKINQR ILVVDPVTSE HELTCQAEGY PKAEVIWTSS DHQVLSGKTT TTNSKREEKL FNVTSTLRIN TTTNEIFYCT FRRLDPEENH TAELVIPGNI LNVSIKI (SEQ ID NO: 108), where X is any amino acid other than Glu. In some cases, X is Arg.

### CD80 Variants

[0362] In some cases, a variant immunomodulatory polypeptide present in a TMAPP of the present disclosure is a variant CD80 polypeptide. Wild-type CD80 binds to CD28.

[0363] A wild-type amino acid sequence of the ectodomain of human CD80 can be as follows:

(SEQ ID NO: 109)
VIHVTK EVKEVATLSC GHNVSVEELA QTRIYWQKEK KMVLTMMSGD
MNIWPEYKNR TIFDITNNLS IVILALRPSD EGTYECVVLK
YEKDAFKREH LAEVTLSVKA DFPTPSISDF EIPTSNIRRI
ICSTSGGFPE PHLSWLENGE ELNAINTTVS QDPETELYAV
SSKLDFNMTT NHSFMCLIKY GHLRVNQTFN WNTTKQEHFP DN.

[0364] A wild-type CD28 amino acid sequence can be as follows: MLRLLLALNL FPSIQVTGNK ILVKQSPMLV AYDNAVNLSC KYSYNLFSRE FRASLHKGLD SAVEVCVVYG NYSQQLQVYS KTGFNCDGKL GNESVTFYLQ NLYVNQTDIY FCKIEVMYPP PYLDNEKSNG TIIHVKGKHL CPSPLFPGPS KPFWVLVVVG GVLACYSLLV TVAFIIFWVR SKRSRLLHSD YMNMTPRRPG PTRKHYQPYA PPRDFAAYRS (SEQ ID NO: 110).

[0365] A wild-type CD28 amino acid sequence can be as follows: MLRLLLALNL FPSIQVTGNK ILVKQSPMLV AYDNAVNLSW KHLCPSPLFP GPSKPFWVLV VVGGVLACYS LLVTVAFIIF WVRSKRSRLL HSDYMNMTPR RPGPTRKHYQ PYAPPRDFAA YRS (SEQ ID NO: 111)

[0366] A wild-type CD28 amino acid sequence can be as follows: MLRLLLALNL FPSIQVTGKH LCPSPLFPGP SKPFWVLVVV GGVLACYSLL VTVAFIIFWV RSKRSRLLHS DYMNMTPRRP GPTRKHYQPY APPRDFAAYR S (SEQ ID NO: 112).

[0367] In some cases, a variant CD80 polypeptide exhibits reduced binding affinity to CD28, compared to the binding affinity of a CD80 polypeptide comprising the amino acid sequence set forth in SEQ ID NO: 109 for CD28. For example, in some cases, a variant CD80 polypeptide binds CD28 with a binding affinity that is at least 10% less, at least 15% less, at least 20% less, at least 25% less, at least 30% less, at least 35% less, at least 40% less, at least 45% less, at least 50% less, at least 55% less, at least 60% less, at least 65% less, at least 70% less, at least 75% less, at least 80% less, at least 85% less, at least 90% less, at least 95% less, or more than 95% less, than the binding affinity of a CD80 polypeptide comprising the amino acid sequence set forth in SEQ ID NO: 109 for CD28 (e.g., a CD28 polypeptide comprising the amino acid sequence set forth in one of SEQ ID NO: 110, 111, or 112).

[0368] In some cases, a variant CD80 polypeptide has a binding affinity to CD28 that is from 100 nM to 100 μM. As another example, in some cases, a variant CD80 polypeptide of the present disclosure has a binding affinity for CD28 (e.g., a CD28 polypeptide comprising the amino acid sequence set forth in SEQ ID NO: 110, SEQ ID NO: 111, or SEQ ID NO: 112) that is from about 100 nM to 150 nM, from about 150 nM to about 200 nM, from about 200 nM to about 250 nM, from about 250 nM to about 300 nM, from about 300 nM to about 350 nM, from about 350 nM to about 400 nM, from about 400 nM to about 500 nM, from about 500 nM to about 600 nM, from about 600 nM to about 700 nM, from about 700 nM to about 800 nM, from about 800 nM to about 900 nM, from about 900 nM to about 1 μM, to about 1 μM to about 5 μM, from about 5 μM to about 10 μM, from about 10 μM to about 15 μM, from about 15 μM to about 20 μM, from about 20 μM to about 25 μM, from about 25 μM to about 50 μM, from about 50 μM to about 75 μM, or from about 75 μM to about 100 μM.

[0369] In some cases, a variant CD80 polypeptide has a single amino acid substitution compared to the CD80 amino acid sequence set forth in SEQ ID NO: 109. In some cases, a variant CD80 polypeptide has from 2 to 10 amino acid substitutions compared to the CD80 amino acid sequence set forth in SEQ ID NO: 109. In some cases, a variant CD80 polypeptide has 2 amino acid substitutions compared to the CD80 amino acid sequence set forth in SEQ ID NO: 109. In some cases, a variant CD80 polypeptide has 3 amino acid substitutions compared to the CD80 amino acid sequence set forth in SEQ ID NO: 109. In some cases, a variant CD80 polypeptide has 4 amino acid substitutions compared to the CD80 amino acid sequence set forth in SEQ ID NO: 109. In some cases, a variant CD80 polypeptide has 5 amino acid substitutions compared to the CD80 amino acid sequence set forth in SEQ ID NO: 109. In some cases, a variant CD80 polypeptide has 6 amino acid substitutions compared to the CD80 amino acid sequence set forth in SEQ ID NO: 109. In some cases, a variant CD80 polypeptide has 7 amino acid substitutions compared to the CD80 amino acid sequence set forth in SEQ ID NO: 109. In some cases, a variant CD80 polypeptide has 8 amino acid substitutions compared to the CD80 amino acid sequence set forth in SEQ ID NO: 109. In some cases, a variant CD80 polypeptide has 9 amino acid substitutions compared to the CD80 amino acid sequence set forth in SEQ ID NO: 109. In some cases, a variant CD80 polypeptide has 10 amino acid substitutions compared to the CD80 amino acid sequence set forth in SEQ ID NO: 109.

[0370] Suitable CD80 variants include a polypeptide that comprises an amino acid sequence having at least 90%, at least 95%, at least 98%, at least 99%, or 100%, amino acid sequence identity to any one of the following amino acid sequences:

[0371] VIHVTK EVKEVATLSC GHXVSVEELA QTRIYWQKEK KMVLTMMSGD MNIWPEYKNR TIFDITNNLS IVILALRPSD EGTYECVVLK YEKDAFKREH LAEVTLSVKA DFPTPSISDF EIPTSNIRRI ICSTSGGFPE PHLSWLENGE ELNAINTTVS QDPETELYAV SSKLDFNMTT NHSFMCLIKY GHLRVNQTFN WNTTKQEHFP DN (SEQ ID NO: 113), where X is any amino acid other than Asn. In some cases, X is Ala;

[0372] VIHVTK EVKEVATLSC GHNVSVEELA QTRIYWQKEK KMVLTMMSGD MNIWPEYKNR TIFDITXNLS IVILALRPSD EGTYECVVLK YEKDAFKREH LAEVTLSVKA DFPTPSISDF EIPTSNIRRI ICSTSGGFPE PHLSWLENGE ELNAINTTVS QDPETELYAV SSKLDFNMTT NHSFMCLIKY GHLRVNQTFN WNTTKQEHFP DN (SEQ ID NO: 114), where X is any amino acid other than Asn. In some cases, X is Ala;

[0373] VIHVTK EVKEVATLSC GHNVSVEELA QTRIYWQKEK KMVLTMMSGD MNIWPEYKNR TIFDITNNLS XVILALRPSD EGTYECVVLK YEKDAFKREH LAEVTLSVKA DFPTPSISDF EIPTSNIRRI ICSTSGGFPE PHLSWLENGE ELNAINTTVS QDPETELYAV SSKLDFNMTT NHSFMCLIKY GHLRVNQTFN WNTTKQEHFP DN (SEQ ID NO: 115), where X is any amino acid other than Ile. In some cases, X is Ala;

[0374] VIHVTK EVKEVATLSC GHNVSVEELA QTRIYWQKEK KMVLTMMSGD MNIWPEYKNR TIFDITNNLS IVILALRPSD EGTYECVVLX YEKDAFKREH LAEVTLSVKA DFPTPSISDF EIPTSNIRRI ICSTSGGFPE PHLSWLENGE ELNAINTTVS QDPETELYAV SSKLDFNMTT NHSFMCLIKY GHLRVNQTFN WNTTKQEHFP DN (SEQ ID NO: 116), where X is any amino acid other than Lys. In some cases, X is Ala;

[0375] VIHVTK EVKEVATLSC GHNVSVEELA QTRIYWQKEK KMVLTMMSGD MNIWPEYKNR TIFDITNNLS IVILALRPSD EGTYECVVLK YEKDAFKREH LAEVTLSVKA DFPTPSISDF EIPTSNIRRI ICSTSGGFPE PHLSWLENGE ELNAINTTVS XDPETELYAV SSKLDFNMTT NHSFMCLIKY GHLRVNQTFN WNTTKQEHFP DN (SEQ ID NO: 117), where X is any amino acid other than Gln. In some cases, X is Ala;

[0376] VIHVTK EVKEVATLSC GHNVSVEELA QTRIYWQKEK KMVLTMMSGD MNIWPEYKNR TIFDITNNLS IVILALRPSD EGTYECVVLK YEKDAFKREH LAEVTLSVKA DFPTPSISDF EIPTSNIRRI ICSTSGGFPE PHLSWLENGE ELNAINTTVS QXPETELYAV SSKLDFNMTT NHSFMCLIKY GHLRVNQTFN WNTTKQEHFP DN (SEQ ID NO: 118), where X is any amino acid other than Asp. In some cases, X is Ala;

[0377] VIHVTK EVKEVATLSC GHNVSVEEXA QTRIYWQKEK KMVLTMMSGD MNIWPEYKNR TIFDITNNLS IVILALRPSD EGTYECVVLK YEKDAFKREH LAEVTLSVKA DFPTPSISDF EIPTSNIRRI ICSTSGGFPE PHLSWLENGE ELNAINTTVS QDPETELYAV SSKLDFNMTT NHSFMCLIKY GHLRVNQTFN WNTTKQEHFP DN (SEQ ID NO: 119), where X is any amino acid other than Leu. In some cases, X is Ala;

[0378] VIHVTK EVKEVATLSC GHNVSVEELA QTRIXWQKEK KMVLTMMSGD MNIWPEYKNR TIFDITNNLS IVILALRPSD EGTYECVVLK YEKDAFKREH LAEVTLSVKA DFPTPSISDF EIPTSNIRRI ICSTSGGFPE PHLSWLENGE ELNAINTTVS QDPETELYAV SSKLDFNMTT NHSFMCLIKY GHLRVNQTFN WNTTKQEHFP DN (SEQ ID NO: 120), where X is any amino acid other than Tyr. In some cases, X is Ala;

[0379] VIHVTK EVKEVATLSC GHNVSVEELA QTRIYWXKEK KMVLTMMSGD MNIWPEYKNR TIFDITNNLS IVILALRPSD EGTYECVVLK YEKDAFKREH LAEVTLSVKA DFPTPSISDF EIPTSNIRRI ICSTSGGFPE PHLSWLENGE ELNAINTTVS QDPETELYAV SSKLDFNMTT NHSFMCLIKY GHLRVNQTFN WNTTKQEHFP DN (SEQ ID NO: 121), where X is any amino acid other than Gln. In some cases, X is Ala;

[0380] VIHVTK EVKEVATLSC GHNVSVEELA QTRIYWQKEK KXVLTMMSGD MNIWPEYKNR TIFDITNNLS IVILALRPSD EGTYECVVLK YEKDAFKREH LAEVTLSVKA DFPTPSISDF EIPTSNIRRI ICSTSGGFPE PHLSWLENGE ELNAINTTVS QDPETELYAV SSKLDFNMTT NHSFMCLIKY GHLRVNQTFN WNTTKQEHFP DN (SEQ ID NO: 122), where X is any amino acid other than Met. In some cases, X is Ala;

[0381] VIHVTK EVKEVATLSC GHNVSVEELA QTRIYWQKEK KMXLTMMSGD MNIWPEYKNR TIFDITNNLS IVILALRPSD EGTYECVVLK YEKDAFKREH LAEVTLSVKA DFPTPSISDF EIPTSNIRRI ICSTSGGFPE PHLSWLENGE ELNAINTTVS QDPETELYAV SSKLDFNMTT NHSFMCLIKY GHLRVNQTFN WNTTKQEHFP DN (SEQ ID NO: 123), where X is any amino acid other than Val. In some cases, X is Ala;

[0382] VIHVTK EVKEVATLSC GHNVSVEELA QTRIYWQKEK KMVLTMMSGD MNXWPEYKNR TIFDITNNLS IVILALRPSD EGTYECVVLK YEKDAFKREH LAEVTLSVKA DFPTPSISDF EIPTSNIRRI ICSTSGGFPE PHLSWLENGE ELNAINTTVS QDPETELYAV SSKLDFNMTT NHSFMCLIKY GHLRVNQTFN WNTTKQEHFP DN (SEQ ID NO: 124), where X is any amino acid other than Ile. In some cases, X is Ala;

[0383] VIHVTK EVKEVATLSC GHNVSVEELA QTRIYWQKEK KMVLTMMSGD MNIWPEXKNR TIFDITNNLS IVILALRPSD EGTYECVVLK YEKDAFKREH LAEVTLSVKA DFPTPSISDF EIPTSNIRRI ICSTSGGFPE PHLSWLENGE ELNAINTTVS QDPETELYAV SSKLDFNMTT NHSFMCLIKY GHLRVNQTFN WNTTKQEHFP DN (SEQ ID NO: 125), where X is any amino acid other than Tyr. In some cases, X is Ala;

[0384] VIHVTK EVKEVATLSC GHNVSVEELA QTRIYWQKEK KMVLTMMSGD MNIWPEYKNR TIFXITNNLS IVILALRPSD EGTYECVVLK YEKDAFKREH LAEVTLSVKA DFPTPSISDF EIPTSNIRRI ICSTSGGFPE PHLSWLENGE ELNAINTTVS QDPETELYAV SSKLDFNMTT NHSFMCLIKY GHLRVNQTFN WNTTKQEHFP DN (SEQ ID NO: 126), where X is any amino acid other than Asp. In some cases, X is Ala;

[0385] VIHVTK EVKEVATLSC GHNVSVEELA QTRIYWQKEK KMVLTMMSGD MNIWPEYKNR TIFDITNNLS IVILALRPSD EGTYECVVLK YEKDAFKREH LAEVTLSVKA DXPTPSISDF EIPTSNIRRI ICSTSGGFPE PHLSWLENGE ELNAINTTVS QDPETELYAV SSKLDFNMTT NHSFMCLIKY GHLRVNQTFN WNTTKQEHFP DN (SEQ ID NO: 127), where X is any amino acid other than Phe. In some cases, X is Ala;

[0386] VIHVTK EVKEVATLSC GHNVSVEELA QTRIYWQKEK KMVLTMMSGD MNIWPEYKNR TIFDITNNLS IVILALRPSD EGTYECVVLK YEKDAFKREH LAEVTLSVKA DFPTPSISDF EIPTSNIRRI ICSTSGGFPE PHLSWLENGE ELNAINTTVX QDPETELYAV SSKLDFNMTT NHSFMCLIKY GHLRVNQTFN WNTTKQEHFP DN (SEQ ID NO: 128), where X is any amino acid other than Ser. In some cases, X is Ala; and

[0387] VIHVTK EVKEVATLSC GHNVSVEELA QTRIYWQKEK KMVLTMMSGD MNIWPEYKNR TIFDITNNLS IVILALRPSD EGTYECVVLK YEKDAFKREH LAEVTLSVKA DFPTXSISDF EIPTSNIRRI ICSTSGGFPE PHLSWLENGE ELNAINTTVS QDPETELYAV SSKLDFNMTT NHSFMCLIKY GHLRVNQTFN WNTTKQEHFP DN (SEQ ID NO: 129), where X is any amino acid other than Pro. In some cases, X is Ala.

### CD86 Variants

[0388] In some cases, a variant immunomodulatory polypeptide present in a T TMAPP of the present disclosure is a variant CD86 polypeptide. Wild-type CD86 binds to CD28.

[0389] The amino acid sequence of the full ectodomain of a wild-type human CD86 can be as follows:

(SEQ ID NO: 130)
APLKIQAYFNETADLPCQFANSQNQSLSELVVFWQDQENLVLNEVYLGKEK
FDSVHSKYMNRTSFDSDSWTLRLHNLQIKDKGLYQCIIHHKKPTGMIRIHQ
MNSELSVLANFSQPEIVPISNITENVYINLTCSSIHGYPEPKKMSVLLRTK
NSTIEYDGIMQKSQDNVTELYDVSISLSVSFPDVTSNMTIFCILETDKTRL
LSSPFSIELEDPQPPPDHIP.

[0390] The amino acid sequence of the IgV domain of a wild-type human CD86 can be as follows:

(SEQ ID NO: 131)
APLKIQAYFNETADLPCQFANSQNQSLSELVVFWQDQENLVLNEVYLGKEK
FDSVHSKYMNRTSFDSDSWTLRLHNLQIKDKGLYQCIIHHKKPTGMIRIHQ
MNSELSVL.

[0391] In some cases, a variant CD86 polypeptide exhibits reduced binding affinity to CD28, compared to the binding affinity of a CD86 polypeptide comprising the amino acid sequence set forth in SEQ ID NO: 130 or SEQ ID NO: 131 for CD28. For example, in some cases, a variant CD86 polypeptide binds CD28 with a binding affinity that is at least 10% less, at least 15% less, at least 20% less, at least 25% less, at least 30% less, at least 35% less, at least 40% less, at least 45% less, at least 50% less, at least 55% less, at least 60% less, at least 65% less, at least 70% less, at least 75% less, at least 80% less, at least 85% less, at least 90% less, at least 95% less, or more than 95% less, than the binding affinity of a CD86 polypeptide comprising the amino acid sequence set forth in SEQ ID NO: 130 or SEQ ID NO: 131 for CD28 (e.g., a CD28 polypeptide comprising the amino acid sequence set forth in one of SEQ ID NO: 110, 111, or 112).

[0392] In some cases, a variant CD86 polypeptide has a binding affinity to CD28 that is from 100 nM to 100 μM. As another example, in some cases, a variant CD86 polypeptide of the present disclosure has a binding affinity for CD28 (e.g., a CD28 polypeptide comprising the amino acid sequence set forth in one of SEQ ID NOs: 110, 111, or 112) that is from about 100 nM to 150 nM, from about 150 nM to about 200 nM, from about 200 nM to about 250 nM, from about 250 nM to about 300 nM, from about 300 nM to about 350 nM, from about 350 nM to about 400 nM, from about 400 nM to about 500 nM, from about 500 nM to about 600 nM, from about 600 nM to about 700 nM, from about 700 nM to about 800 nM, from about 800 nM to about 900 nM, from about 900 nM to about 1 μM, to about 1 μM to about 5 μM, from about 5 μM to about 10 μM, from about 10 μM to about 15 μM, from about 15 μM to about 20 μM, from about 20 μM to about 25 μM, from about 25 μM to about 50 μM, from about 50 μM to about 75 μM, or from about 75 μM to about 100 μM.

[0393] In some cases, a variant CD86 polypeptide has a single amino acid substitution compared to the CD86 amino acid sequence set forth in SEQ ID NO: 130. In some cases, a variant CD86 polypeptide has from 2 to 10 amino acid substitutions compared to the CD86 amino acid sequence set forth in SEQ ID NO: 130. In some cases, a variant CD86 polypeptide has 2 amino acid substitutions compared to the CD86 amino acid sequence set forth in SEQ ID NO: 130. In some cases, a variant CD86 polypeptide has 3 amino acid substitutions compared to the CD86 amino acid sequence set forth in SEQ ID NO: 130. In some cases, a variant CD86 polypeptide has 4 amino acid substitutions compared to the CD86 amino acid sequence set forth in SEQ ID NO: 130. In some cases, a variant CD86 polypeptide has 5 amino acid substitutions compared to the CD86 amino acid sequence set forth in SEQ ID NO: 130. In some cases, a variant CD86 polypeptide has 6 amino acid substitutions compared to the CD86 amino acid sequence set forth in SEQ ID NO: 130. In some cases, a variant CD86 polypeptide has 7 amino acid substitutions compared to the CD86 amino acid sequence set forth in SEQ ID NO: 130. In some cases, a variant CD86 polypeptide has 8 amino acid substitutions compared to the CD86 amino acid sequence set forth in SEQ ID NO: 130. In some cases, a variant CD86 polypeptide has 9 amino acid substitutions compared to the CD86 amino acid sequence set forth in SEQ ID NO: 130. In some cases, a variant CD86 polypeptide has 10 amino acid substitutions compared to the CD86 amino acid sequence set forth in SEQ ID NO: 130.

[0394] In some cases, a variant CD86 polypeptide has a single amino acid substitution compared to the CD86 amino acid sequence set forth in SEQ ID NO: 131. In some cases, a variant CD86 polypeptide has from 2 to 10 amino acid substitutions compared to the CD86 amino acid sequence set forth in SEQ ID NO: 131. In some cases, a variant CD86 polypeptide has 2 amino acid substitutions compared to the CD86 amino acid sequence set forth in SEQ ID NO: β1. In some cases, a variant CD86 polypeptide has 3 amino acid substitutions compared to the CD86 amino acid sequence set forth in SEQ ID NO: 131. In some cases, a variant CD86 polypeptide has 4 amino acid substitutions compared to the CD86 amino acid sequence set forth in SEQ ID NO: 131. In some cases, a variant CD86 polypeptide has 5 amino acid substitutions compared to the CD86 amino acid sequence set forth in SEQ ID NO: 131. In some cases, a variant CD86 polypeptide has 6 amino acid substitutions compared to the CD86 amino acid sequence set forth in SEQ ID NO: 131. In some cases, a variant CD86 polypeptide has 7 amino acid substitutions compared to the CD86 amino acid sequence set forth in SEQ ID NO: 131. In some cases, a variant CD86 polypeptide has 8 amino acid substitutions compared to the CD86 amino acid sequence set forth in SEQ ID NO: 131. In some cases, a variant CD86 polypeptide has 9 amino acid substitutions compared to the CD86 amino acid sequence set forth in SEQ ID NO: β1. In some cases, a variant CD86 polypeptide has 10 amino acid substitutions compared to the CD86 amino acid sequence set forth in SEQ ID NO: 131.

[0395] Suitable CD86 variants include a polypeptide that comprises an amino acid sequence having at least 90%, at least 95%, at least 98%, at least 99%, or 100%, amino acid sequence identity to any one of the following amino acid sequences:

[0396] APLKIQAYFNETADLPCQFANSQNQSLSELVVFWQDQENLVLNEVYLGKEKFDSVHSKY MXRTSFDSDSWTLRLHNLQIKDKGLYQCIIHHKKPTGMIRIHQMNSELSVLANFSQPEIVPISN ITENVYINLTCSSIHGYPEPKKMSVLLRTKNSTIEYDGIMQKSQDNVTELYDVSISLSVSFPDV TSNMTIFCILETDKTRLLSSPFSIELEDPQPPPDHIP (SEQ ID NO: β2), where X is any amino acid other than Asn. In some cases, X is Ala;

[0397] APLKIQAYFNETADLPCQFANSQNQSLSELVVFWQDQENLVLNEVYLGKEKFDSVHSKY MNRTSFXSDSWTLRLHNLQIKDKGLYQCIIHHKKPTGMIRIHQMNSELSVLANFSQPEIVPISN ITENVYINLTCSSIHGYPEPKKMSVLLRTKNSTIEYDGIMQKSQDNVTELYDVSISLSVSFPDV TSNMTIFCILETDKTRLLSSPFSIELEDPQPPPDHIP (SEQ ID NO: 133), where X is any amino acid other than Asp. In some cases, X is Ala;

[0398] APLKIQAYFNETADLPCQFANSQNQSLSELVVFWQDQENLVLNEVYLGKEKFDSVHSKY MNRTSFDSDSXTLRLHNLQIKDKGLYQCIIHHKKPTGMIRIHQMNSELSVLANFSQPEIVPISN ITENVYINLTCSSIHGYPEPKKMSVLLRTKNSTIEYDGIMQKSQDNVTELYDVSISLSVSFPDV TSNMTIFCILETDKTRLLSSPFSIELEDPQPPPDHIP (SEQ ID NO:134), where X is any amino acid other than Trp. In some cases, X is Ala;

[0399] APLKIQAYFNETADLPCQFANSQNQSLSELVVFWQDQENLVLNEVYLGKEKFDSVHSKY MNRTSFDSDSWTLRLHNLQIKDKGLYQCIIHXKKPTGMIRIHQMNSELSVLANFSQPEIVPISN ITENVYINLTCSSIHGYPEPKKMSVLLRTKNSTIEYDGIMQKSQDNVTELYDVSISLSVSFPDV TSNMTIFCILETDKTRLLSSPFSIELEDPQPPPDHIP (SEQ ID NO: 135), where X is any amino acid other than His. In some cases, X is Ala;

[0400] APLKIQAYFNETADLPCQFANSQNQSLSELVVFWQDQENLVLNEVYLGKEKFDSVHSKY MXRTSFDSDSWTLRLHNLQIKDKGLYQCIIHHKKPTGMIRIHQMNSELSVL (SEQ ID NO: 136), where X is any amino acid other than Asn. In some cases, X is Ala;

[0401] APLKIQAYFNETADLPCQFANSQNQSLSELVVFWQDQENLVLNEVYLGKEKFDSVHSKY MNRTSFXSDSWTLRLHNLQIKDKGLYQCIIHHKKPTGMIRIHQMNSELSVL (SEQ ID NO: 137), where X is any amino acid other than Asp. In some cases, X is Ala;

[0402] APLKIQAYFNETADLPCQFANSQNQSLSELVVFWQDQENLVLNEVYLGKEKFDSVHSKY MNRTSFDSDSXTLRLHNLQIKDKGLYQCIIHHKKPTGMIRIHQMNSELSVL (SEQ ID NO: 138), where X is any amino acid other than Trp. In some cases, X is Ala;

[0403] APLKIQAYFNETADLPCQFANSQNQSLSELVVFWQDQENLVLNEVYLGKEKFDSVHSKY MNRTSFDSDSWTLRLHNLQIKDKGLYQCIIHXKKPTGMIRIHQMNSELSVL (SEQ ID NO: 139), where X is any amino acid other than His. In some cases, X is Ala;

[0404] APLKIQAYFNETADLPCQFANSQNQSLSELVVFWQDQENLXLNEVYLGKEKFDSVHSKY MNRTSFDSDSWTLRLHNLQIKDKGLYQCIIHHKKPTGMIRIHQMNSELSVLANFSQPEIVPISN ITENVYINLTCSSIHGYPEPKKMSVLLRTKNSTIEYDGIMQKSQDNVTELYDVSISLSVSFPDV TSNMTIFCILETDKTRLLSSPFSIELEDPQPPPDHIP (SEQ ID NO: 140), where X is any amino acid other than Val. In some cases, X is Ala;

[0405] APLKIQAYFNETADLPCQFANSQNQSLSELVVFWQDQENLXLNEVYLGKEKFDSVHSKY MNRTSFDSDSWTLRLHNLQIKDKGLYQCIIHHKKPTGMIRIHQMNSELSVL (SEQ ID NO: 141), where X is any amino acid other than Val. In some cases, X is Ala;

[0406] APLKIQAYFNETADLPCQFANSQNQSLSELVVFWXDQENLVLNEVYLGKEKFDSVHSKY MNRTSFDSDSWTLRLHNLQIKDKGLYQCIIHHKKPTGMIRIHQMNSELSVLANFSQPEIVPISN ITENVYINLTCSSIHGYPEPKKMSVLLRTKNSTIEYDGIMQKSQDNVTELYDVSISLSVSFPDV TSNMTIFCILETDKTRLLSSPFSIELEDPQPPPDHIP (SEQ ID NO: 142), where X is any amino acid other than Gln. In some cases, X is Ala;

[0407] APLKIQAYFNETADLPCQFANSQNQSLSELVVFWXDQENLVLNEVYLGKEKFDSVHSKY MNRTSFDSDSWTLRLHNLQIKDKGLYQCIIHHKKPTGMIRIHQMNSELSVL (SEQ ID NO: 143), where X is any amino acid other than Gln. In some cases, X is Ala;

[0408] APLKIQAYFNETADLPCQFANSQNQSLSELVVXWQDQENLVLNEVYLGKEKFDSVHSKY MNRTSFDSDSWTLRLHNLQIKDKGLYQCIIHHKKPTGMIRIHQMNSELSVLANFSQPEIVPISN ITENVYINLTCSSIHGYPEPKKMSVLLRTKNSTIEYDGIMQKSQDNVTELYDVSISLSVSFPDV TSNMTIFCILETDKTRLLSSPFSIELEDPQPPPDHIP (SEQ ID NO: 144), where X is any amino acid other than Phe. In some cases, X is Ala;

[0409] APLKIQAYFNETADLPCQFANSQNQSLSELVVXWQDQENLVLNEVYLGKEKFDSVHSKY MNRTSFDSDSWTLRLHNLQIKDKGLYQCIIHHKKPTGMIRIHQMNSELSVL (SEQ ID NO: 145), where X is any amino acid other than Phe. In some cases, X is Ala;

[0410] APLKIQAYFNETADLPCQFANSQNQSLSELVVFWQDQENLVLNEVYLGKEKFDSVHSKY MNRTSFDSDSWTXRLHNLQIKDKGLYQCIIHHKKPTGMIRIHQMNSELSVLANFSQPEIVPISN ITENVYINLTCSSIHGYPEPKKMSVLLRTKNSTIEYDGIMQKSQDNVTELYDVSISLSVSFPDV TSNMTIFCILETDKTRLLSSPFSIELEDPQPPPDHIP (SEQ ID NO: 146), where X is any amino acid other than Leu. In some cases, X is Ala;

[0411] APLKIQAYFNETADLPCQFANSQNQSLSELVVFWQDQENLVLNEVYLGKEKFDSVHSKY MNRTSFDSDSWTXRLHNLQIKDKGLYQCIIHHKKPTGMIRIHQMNSELSVL (SEQ ID NO: 147), where X is any amino acid other than Leu. In some cases, X is Ala;

[0412] APLKIQAYFNETADLPCQFANSQNQSLSELVVFWQDQENLVLNEVYLGKEKFDSVHSKX MNRTSFDSDSWTLRLHNLQIKDKGLYQCIIHHKKPTGMIRIHQMNSELSVLANFSQPEIVPISN ITENVYINLTCSSIHGYPEPKKMSVLLRTKNSTIEYDGIMQKSQDNVTELYDVSISLSVSFPDV TSNMTIFCILETDKTRLLSSPFSIELEDPQPPPDHIP (SEQ ID NO: 148), where X is any amino acid other than Tyr. In some cases, X is Ala;

[0413] APLKIQAYFNETADLPCQFANSQNQSLSELVVFWQDQENLVLNEVYLGKEKFDSVHSKX MNRTSFDSDSWTLRLHNLQIKDKGLYQCIIHHKKPTGMIRIHQMNSELSVL (SEQ ID NO: 149), where X is any amino acid other than Tyr. In some cases, X is Ala;

[0414] APLKIQAYFNETADLPCQFANSQNQSLSELVVFWQDQENLVLNEVYLGKEKFDSVHSKY MXRTSFDSDSWTLRLHNLQIKDKGLYQCIIHXKKPTGMIRIHQMNSELSVLANFSQPEIVPISN ITENVYINLTCSSIHGYPEPKKMSVLLRTKNSTIEYDGIMQKSQDNVTELYDVSISLSVSFPDV TSNMTIFCILETDKTRLLSSPFSIELEDPQPPPDHIP (SEQ ID NO: 150), where the first X is any amino acid other than Asn and the second X is any amino acid other than His. In some cases, the first and the second X are both Ala;

[0415] APLKIQAYFNETADLPCQFANSQNQSLSELVVFWQDQENLVLNEVYLGKEKFDSVHSKY MXRTSFDSDSWTLRLHNLQIKDKGLYQCIIHXKKPTGMIRIHQMNSELSVL (SEQ ID NO: 151), where the first X is any amino acid other than Asn and the second X is any amino acid other than His. In some cases, the first and the second X are both Ala;

[0416] APLKIQAYFNETADLPCQFANSQNQSLSELVVFWQDQENLVLNEVYLGKEKFDSVHSKY MNRTSFX₁SDSWTLRLHNLQIKDKGLYQCIIHX₂KKPTGMIRIHQMNSELSVLANFSQPEIVPIS NITENVYINLTCSSIHGYPEPKKMSVLLRTKNSTIEYDGIMQKSQDNVTELYDVSISLSVSFPD VTSNMTIFCILETDKTRLLSSPFSIELEDPQPPPDHIP (SEQ ID NO: 152), where X₁ is any amino acid other than Asp, and X₂ is any amino acid other than His. In some cases, X₁ is Ala and X₂ is Ala;

[0417] APLKIQAYFNETADLPCQFANSQNQSLSELVVFWQDQENLVLNEVYLGKEKFDSVHSKY MNRTSFX₁SDSWILRLHNLQIKDKGLYQCIIHX₂KKPTGMIRIHQMNSELSVL (SEQ ID NO: 153), where the first X is any amino acid other than Asn and the second X is any amino acid other than His. In some cases, the first and the second X are both Ala;

[0418] APLKIQAYFNETADLPCQFANSQNQSLSELVVFWQDQENLVLNEVYLGKEKFDSVHSKY MX₁RTSFX₂SDSWITRLHNLQIKDKGLYQCIIHX₃KKPTGMIRIHQMNSELSVLANFSQPEIVPI SNITENVYINLTCSSIHGYPEPKKMSVLLRTKNSTIEYDGIMQKSQDNVTELYDVSISLSVSFP DVTSNMTIFCILETDKTRLLSSPFSIELEDPQPPPDHIP (SEQ ID NO: 154), where X₁ is any amino acid other than Asn, X₂ is any amino acid other than Asp, and X₃ is any amino acid other than His. In some cases, X₁ is Ala, X₂ is Ala, and X₃ is Ala; and

[0419] APLKIQAYFNETADLPCQFANSQNQSLSELVVFWQDQENLVLNEVYLGKEKFDSVHSKY MX₁RTSFX₂SDSWITRLHNLQIKDKGLYQCIIHX₃KKPTGMIRIHQMNSELSVL (SEQ ID NO: 155), where X₁ is any amino acid other than Asn, X₂ is any amino acid other than Asp, and X₃ is any amino acid other than His In some cases, X₁ is Ala, X₂ is Ala, and X₃ is Ala.

### 4-1BBL Variants

[0420] In some cases, a variant immunomodulatory polypeptide present in a TMAPP of the present disclosure is a variant 4-1BBL polypeptide. Wild-type 4-1BBL binds to 4-1BB (CD137).

[0421] A wild-type 4-1BBL amino acid sequence can be as follows: MEYASDASLD PEAPWPPAPR ARACRVLPWA LVAGLLLLLL LAAACAVFLA CPWAVSGARA SPGSAASPRL REGPELSPDD PAGLLDLRQG MFAQLVAQNV LLIDGPLSWY SDPGLAGVSL TGGLSYKEDT KELVVAKAGV YYVFFQLELR RVVAGEGSGS VSLALHLQPL RSAAGAAALA LTVDLPPASS EARNSAFGFQ GRLLHLSAGQ RLGVHLHTEA RARHAWQLTQ GATVLGLFRV TPEIPAGLPS PRSE (SEQ ID NO: 156).

[0422] In some cases, a variant 4-1BBL polypeptide is a variant of the tumor necrosis factor (TNF) homology domain (THD) of human 4-1BBL.

[0423] A wild-type amino acid sequence of the THD of human 4-1BBL can be, e.g., one of SEQ ID NOs: 157-159, as follows:

(SEQ ID NO: 157)
PAGLLDLRQG MFAQLVAQNV LLIDGPLSWY SDPGLAGVSL
TGGLSYKEDT KELVVAKAGV YYVFFQLELR RVVAGEGSGS
VSLALHLQPL RSAAGAAALA LTVDLPPASS EARNSAFGFQ
GRLLHLSAGQ RLGVHLHTEA RARHAWQLTQ GATVLGLFRV
TPEIPAGLPS PRSE.
(SEQ ID NO: 158)
D PAGLLDLRQG MFAQLVAQNV LLIDGPLSWY SDPGLAGVSL
TGGLSYKEDT KELVVAKAGV YYVFFQLELR RVVAGEGSGS
VSLALHLQPL RSAAGAAALA LTVDLPPASS EARNSAFGFQ
GRLLHLSAGQ RLGVHLHTEA RARHAWQLTQ GATVLGLFRV
TPEIPAGLPS PRSE.
(SEQ ID NO: 159)
D PAGLLDLRQG MFAQLVAQNV LLIDGPLSWY SDPGLAGVSL
TGGLSYKEDT KELVVAKAGV YYVFFQLELR RVVAGEGSGS
VSLALHLQPL RSAAGAAALA LTVDLPPASS EARNSAFGFQ
GRLLHLSAGQ RLGVHLHTEA RARHAWQLTQ GATVLGLFRV TPEIPA.

[0424] A wild-type 4-1BB amino acid sequence can be as follows: MGNSCYNIVA TLLLVLNFER TRSLQDPCSN CPAGTFCDNN RNQICSPCPP NSFSSAGGQR TCDICRQCKG VFRTRKECSS TSNAECDCTP GFHCLGAGCS MCEQDCKQGQ ELTKKGCKDC CFGTFNDQKR GICRPWTNCS LDGKSVLVNG TKERDVVCGP SPADLSPGAS SVTPPAPARE PGHSPQIISF FLALTSTALL FLLFFLTLRF SVVKRGRKKL LYIFKQPFMR PVQTTQEEDG CSCRFPEEEE GGCEL (SEQ ID NO: 160).

[0425] In some cases, a variant 4-1BBL polypeptide exhibits reduced binding affinity to 4-1BB, compared to the binding affinity of a 4-1BBL polypeptide comprising the amino acid sequence set forth in one of SEQ ID NOs: 156-159. For example, in some cases, a variant 4-1BBL polypeptide of the present disclosure binds 4-1BB with a binding affinity that is at least 10% less, at least 15% less, at least 20% less, at least 25%, at least 30% less, at least 35% less, at least 40% less, at least 45% less, at least 50% less, at least 55% less, at least 60% less, at least 65% less, at least 70% less, at least 75% less, at least 80% less, at least 85% less, at least 90% less, at least 95% less, or more than 95% less, than the binding affinity of a 4-1BBL polypeptide comprising the amino acid sequence set forth in one of SEQ ID NOs: 156-159 for a 4-1BB polypeptide (e.g., a 4-1BB polypeptide comprising the amino acid sequence set forth in SEQ ID NO: 160), when assayed under the same conditions.

[0426] In some cases, a variant 4-1BBL polypeptide has a binding affinity to 4-1BB that is from 100 nM to 100 μM. As another example, in some cases, a variant 4-1BBL polypeptide has a binding affinity for 4-1BB (e.g., a 4-1BB polypeptide comprising the amino acid sequence set forth in SEQ ID NO: 160) that is from about 100 nM to 150 nM, from about 150 nM to about 200 nM, from about 200 nM to about 250 nM, from about 250 nM to about 300 nM, from about 300 nM to about 350 nM, from about 350 nM to about 400 nM, from about 400 nM to about 500 nM, from about 500 nM to about 600 nM, from about 600 nM to about 700 nM, from about 700 nM to about 800 nM, from about 800 nM to about 900 nM, from about 900 nM to about 1 μM, to about 1 μM to about 5 μM, from about 5 μM to about 10 μM, from about 10 μM to about 15 μM, from about 15 μM to about 20 μM, from about 20 μM to about 25 μM, from about 25 μM to about 50 μM, from about 50 μM to about 75 μM, or from about 75 μM to about 100 μM.

[0427] In some cases, a variant 4-1BBL polypeptide has a single amino acid substitution compared to the 4-1BBL amino acid sequence set forth in one of SEQ ID NOs: 156-159. In some cases, a variant 4-1BBL polypeptide has from 2 to 10 amino acid substitutions compared to the 4-1BBL amino acid sequence set forth in one of SEQ ID NOs: 156-159. In some cases, a variant 4-1BBL polypeptide has 2 amino acid substitutions compared to the 4-1BBL amino acid sequence set forth in one of SEQ ID NOs: 156-159. In some cases, a variant 4-1BBL polypeptide has 3 amino acid substitutions compared to the 4-1BBL amino acid sequence set forth in one of SEQ ID NOs: 156-159. In some cases, a variant 4-1BBL polypeptide has 4 amino acid substitutions compared to the 4-1BBL amino acid sequence set forth in one of SEQ ID NOs: 156-159. In some cases, a variant 4-1BBL polypeptide has 5 amino acid substitutions compared to the 4-1BBL amino acid sequence set forth in one of SEQ ID NOs: 156-159. In some cases, a variant 4-1BBL polypeptide has 6 amino acid substitutions compared to the 4-1BBL amino acid sequence set forth in one of SEQ ID NOs: 156-159. In some cases, a variant 4-1BBL polypeptide has 7 amino acid substitutions compared to the 4-1BBL amino acid sequence set forth in one of SEQ ID NOs: 156-159. In some cases, a variant 4-1BBL polypeptide has 8 amino acid substitutions compared to the 4-1BBL amino acid sequence set forth in one of SEQ ID NOs: 156-159. In some cases, a variant 4-1BBL polypeptide has 9 amino acid substitutions compared to the 4-1BBL amino acid sequence set forth in one of SEQ ID NOs: 156-159. In some cases, a variant 4-1BBL polypeptide has 10 amino acid substitutions compared to the 4-1BBL amino acid sequence set forth in one of SEQ ID NOs: 156-159.

[0428] Suitable 4-1BBL variants include a polypeptide that comprises an amino acid sequence having at least 90%, at least 95%, at least 98%, at least 99%, or 100%, amino acid sequence identity to any one of the following amino acid sequences:

[0429] PAGLLDLRQG MFAQLVAQNV LLIDGPLSWY SDPGLAGVSL TGGLSYXEDT KELVVAKAGV YYVFFQLELR RVVAGEGSGS VSLALHLQPL RSAAGAAALA LTVDLPPASS EARNSAFGFQ GRLLHLSAGQ RLGVHLHTEA RARHAWQLTQ GATVLGLFRV TPEIPAGLPS PRSE (SEQ ID NO: 161), where X is any amino acid other than Lys. In some cases, X is Ala;

[0430] PAGLLDLRQG MFAQLVAQNV LLIDGPLSWY SDPGLAGVSL TGGLSYKEDT KELVVAKAGV YYVFFQLELR RVVAGEGSGS VSLALHLQPL RSAAGAAALA LTVDLPPASS EARNSAFGFQ GRLLHLSAGQ RLGVHLHTEA RARHAWXLTQ GATVLGLFRV TPEIPAGLPS PRSE (SEQ ID NO: 162), where X is any amino acid other than Gln. In some cases, X is Ala;

[0431] PAGLLDLRQG XFAQLVAQNV LLIDGPLSWY SDPGLAGVSL TGGLSYKEDT KELVVAKAGV YYVFFQLELR RVVAGEGSGS VSLALHLQPL RSAAGAAALA LTVDLPPASS EARNSAFGFQ GRLLHLSAGQ RLGVHLHTEA RARHAWQLTQ GATVLGLFRV TPEIPAGLPS PRSE (SEQ ID NO: 163), where X is any amino acid other than Met. In some cases, X is Ala;

[0432] PAGLLDLRQG MXAQLVAQNV LLIDGPLSWY SDPGLAGVSL TGGLSYKEDT KELVVAKAGV YYVFFQLELR RVVAGEGSGS VSLALHLQPL RSAAGAAALA LTVDLPPASS EARNSAFGFQ GRLLHLSAGQ RLGVHLHTEA RARHAWQLTQ GATVLGLFRV TPEIPAGLPS PRSE (SEQ ID NO: 164), where X is any amino acid other than Phe. In some cases, X is Ala;

[0433] PAGLLDLRQG MFAXLVAQNV LLIDGPLSWY SDPGLAGVSL TGGLSYKEDT KELVVAKAGV YYVFFQLELR RVVAGEGSGS VSLALHLQPL RSAAGAAALA LTVDLPPASS EARNSAFGFQ GRLLHLSAGQ RLGVHLHTEA RARHAWQLTQ GATVLGLFRV TPEIPAGLPS PRSE (SEQ ID NO: 165), where X is any amino acid other than Gln. In some cases, X is Ala;

[0434] PAGLLDLRQG MFAQXVAQNV LLIDGPLSWY SDPGLAGVSL TGGLSYKEDT KELVVAKAGV YYVFFQLELR RVVAGEGSGS VSLALHLQPL RSAAGAAALA LTVDLPPASS EARNSAFGFQ GRLLHLSAGQ RLGVHLHTEA RARHAWQLTQ GATVLGLFRV TPEIPAGLPS PRSE (SEQ ID NO:166), where X is any amino acid other than Leu. In some cases, X is Ala;

[0435] PAGLLDLRQG MFAQLXAQNV LLIDGPLSWY SDPGLAGVSL TGGLSYKEDT KELVVAKAGV YYVFFQLELR RVVAGEGSGS VSLALHLQPL RSAAGAAALA LTVDLPPASS EARNSAFGFQ GRLLHLSAGQ RLGVHLHTEA RARHAWQLTQ GATVLGLFRV TPEIPAGLPS PRSE (SEQ ID NO: 167), where X is any amino acid other than Val. In some cases, X is Ala;

[0436] PAGLLDLRQG MFAQLVAXNV LLIDGPLSWY SDPGLAGVSL TGGLSYKEDT KELVVAKAGV YYVFFQLELR RVVAGEGSGS VSLALHLQPL RSAAGAAALA LTVDLPPASS EARNSAFGFQ GRLLHLSAGQ RLGVHLHTEA RARHAWQLTQ GATVLGLFRV TPEIPAGLPS PRSE (SEQ ID NO: 168), where X is any amino acid other than Gln. In some cases, X is Ala;

[0437] PAGLLDLRQG MFAQLVAQXV LLIDGPLSWY SDPGLAGVSL TGGLSYKEDT KELVVAKAGV YYVFFQLELR RVVAGEGSGS VSLALHLQPL RSAAGAAALA LTVDLPPASS EARNSAFGFQ GRLLHLSAGQ RLGVHLHTEA RARHAWQLTQ GATVLGLFRV TPEIPAGLPS PRSE (SEQ ID NO: 169), where X is any amino acid other than Asn. In some cases, X is Ala;

[0438] PAGLLDLRQG MFAQLVAQNX LLIDGPLSWY SDPGLAGVSL TGGLSYKEDT KELVVAKAGV YYVFFQLELR RVVAGEGSGS VSLALHLQPL RSAAGAAALA LTVDLPPASS EARNSAFGFQ GRLLHLSAGQ RLGVHLHTEA RARHAWQLTQ GATVLGLFRV TPEIPAGLPS PRSE (SEQ ID NO: 170), where X is any amino acid other than Val. In some cases, X is Ala;

[0439] PAGLLDLRQG MFAQLVAQNV XLIDGPLSWY SDPGLAGVSL TGGLSYKEDT KELVVAKAGV YYVFFQLELR RVVAGEGSGS VSLALHLQPL RSAAGAAALA LTVDLPPASS EARNSAFGFQ GRLLHLSAGQ RLGVHLHTEA RARHAWQLTQ GATVLGLFRV TPEIPAGLPS PRSE (SEQ ID NO: 171), where X is any amino acid other than Leu. In some cases, X is Ala;

[0440] PAGLLDLRQG MFAQLVAQNV LXIDGPLSWY SDPGLAGVSL TGGLSYKEDT KELVVAKAGV YYVFFQLELR RVVAGEGSGS VSLALHLQPL RSAAGAAALA LTVDLPPASS EARNSAFGFQ GRLLHLSAGQ RLGVHLHTEA RARHAWQLTQ GATVLGLFRV TPEIPAGLPS PRSE (SEQ ID NO: 172), where X is any amino acid other than Leu. In some cases, X is Ala;

[0441] PAGLLDLRQG MFAQLVAQNV LLXDGPLSWY SDPGLAGVSL TGGLSYKEDT KELVVAKAGV YYVFFQLELR RVVAGEGSGS VSLALHLQPL RSAAGAAALA LTVDLPPASS EARNSAFGFQ GRLLHLSAGQ RLGVHLHTEA RARHAWQLTQ GATVLGLFRV TPEIPAGLPS PRSE (SEQ ID NO: 173), where X is any amino acid other than Ile. In some cases, X is Ala;

[0442] PAGLLDLRQG MFAQLVAQNV LLIXGPLSWY SDPGLAGVSL TGGLSYKEDT KELVVAKAGV YYVFFQLELR RVVAGEGSGS VSLALHLQPL RSAAGAAALA LTVDLPPASS EARNSAFGFQ GRLLHLSAGQ RLGVHLHTEA RARHAWQLTQ GATVLGLFRV TPEIPAGLPS PRSE (SEQ ID NO: 174), where X is any amino acid other than Asp. In some cases, X is Ala;

[0443] PAGLLDLRQG MFAQLVAQNV LLIDXPLSWY SDPGLAGVSL TGGLSYKEDT KELVVAKAGV YYVFFQLELR RVVAGEGSGS VSLALHLQPL RSAAGAAALA LTVDLPPASS EARNSAFGFQ GRLLHLSAGQ RLGVHLHTEA RARHAWQLTQ GATVLGLFRV TPEIPAGLPS PRSE (SEQ ID NO: 175), where X is any amino acid other than Gly. In some cases, X is Ala;

[0444] PAGLLDLRQG MFAQLVAQNV LLIGGXLSWY SDPGLAGVSL TGGLSYKEDT KELVVAKAGV YYVFFQLELR RVVAGEGSGS VSLALHLQPL RSAAGAAALA LTVDLPPASS EARNSAFGFQ GRLLHLSAGQ RLGVHLHTEA RARHAWQLTQ GATVLGLFRV TPEIPAGLPS PRSE (SEQ ID NO: 176), where X is any amino acid other than Pro. In some cases, X is Ala;

[0445] PAGLLDLRQG MFAQLVAQNV LLIGGPXSWY SDPGLAGVSL TGGLSYKEDT KELVVAKAGV YYVFFQLELR RVVAGEGSGS VSLALHLQPL RSAAGAAALA LTVDLPPASS EARNSAFGFQ GRLLHLSAGQ RLGVHLHTEA RARHAWQLTQ GATVLGLFRV TPEIPAGLPS PRSE (SEQ ID NO: 177), where X is any amino acid other than Leu. In some cases, X is Ala;

[0446] PAGLLDLRQG MFAQLVAQNV LLIGGPLXWY SDPGLAGVSL TGGLSYKEDT KELVVAKAGV YYVFFQLELR RVVAGEGSGS VSLALHLQPL RSAAGAAALA LTVDLPPASS EARNSAFGFQ GRLLHLSAGQ RLGVHLHTEA RARHAWQLTQ GATVLGLFRV TPEIPAGLPS PRSE (SEQ ID NO: 178), where X is any amino acid other than Ser. In some cases, X is Ala;

[0447] PAGLLDLRQG MFAQLVAQNV LLIGGPLSXY SDPGLAGVSL TGGLSYKEDT KELVVAKAGV YYVFFQLELR RVVAGEGSGS VSLALHLQPL RSAAGAAALA LTVDLPPASS EARNSAFGFQ GRLLHLSAGQ RLGVHLHTEA RARHAWQLTQ GATVLGLFRV TPEIPAGLPS PRSE (SEQ ID NO: 179), where X is any amino acid other than Trp. In some cases, X is Ala;

[0448] PAGLLDLRQG MFAQLVAQNV LLIGGPLSWX SDPGLAGVSL TGGLSYKEDT KELVVAKAGV YYVFFQLELR RVVAGEGSGS VSLALHLQPL RSAAGAAALA LTVDLPPASS EARNSAFGFQ GRLLHLSAGQ RLGVHLHTEA RARHAWQLTQ GATVLGLFRV TPEIPAGLPS PRSE (SEQ ID NO: 180), where X is any amino acid other than Tyr. In some cases, X is Ala;

[0449] PAGLLDLRQG MFAQLVAQNV LLIGGPLSWY XDPGLAGVSL TGGLSYKEDT KELVVAKAGV YYVFFQLELR RVVAGEGSGS VSLALHLQPL RSAAGAAALA LTVDLPPASS EARNSAFGFQ GRLLHLSAGQ RLGVHLHTEA RARHAWQLTQ GATVLGLFRV TPEIPAGLPS PRSE (SEQ ID NO: 181), where X is any amino acid other than Ser. In some cases, X is Ala;

[0450] PAGLLDLRQG MFAQLVAQNV LLIGGPLSWY SXPGLAGVSL TGGLSYKEDT KELVVAKAGV YYVFFQLELR RVVAGEGSGS VSLALHLQPL RSAAGAAALA LTVDLPPASS EARNSAFGFQ GRLLHLSAGQ RLGVHLHTEA RARHAWQLTQ GATVLGLFRV TPEIPAGLPS PRSE (SEQ ID NO: 182), where X is any amino acid other than Asp. In some cases, X is Ala;

[0451] PAGLLDLRQG MFAQLVAQNV LLIGGPLSWY SDXGLAGVSL TGGLSYKEDT KELVVAKAGV YYVFFQLELR RVVAGEGSGS VSLALHLQPL RSAAGAAALA LTVDLPPASS EARNSAFGFQ GRLLHLSAGQ RLGVHLHTEA RARHAWQLTQ GATVLGLFRV TPEIPAGLPS PRSE (SEQ ID NO: 183), where X is any amino acid other than Pro. In some cases, X is Ala;

[0452] PAGLLDLRQG MFAQLVAQNV LLIGGPLSWY SDPXLAGVSL TGGLSYKEDT KELVVAKAGV YYVFFQLELR RVVAGEGSGS VSLALHLQPL RSAAGAAALA LTVDLPPASS EARNSAFGFQ GRLLHLSAGQ RLGVHLHTEA RARHAWQLTQ GATVLGLFRV TPEIPAGLPS PRSE (SEQ ID NO: 184), where X is any amino acid other than Gly. In some cases, X is Ala;

[0453] PAGLLDLRQG MFAQLVAQNV LLIGGPLSWY SDPGXAGVSL TGGLSYKEDT KELVVAKAGV YYVFFQLELR RVVAGEGSGS VSLALHLQPL RSAAGAAALA LTVDLPPASS EARNSAFGFQ GRLLHLSAGQ RLGVHLHTEA RARHAWQLTQ GATVLGLFRV TPEIPAGLPS PRSE (SEQ ID NO: 185), where X is any amino acid other than Leu. In some cases, X is Ala;

[0454] PAGLLDLRQG MFAQLVAQNV LLIGGPLSWY SDPGLAXVSL TGGLSYKEDT KELVVAKAGV YYVFFQLELR RVVAGEGSGS VSLALHLQPL RSAAGAAALA LTVDLPPASS EARNSAFGFQ GRLLHLSAGQ RLGVHLHTEA RARHAWQLTQ GATVLGLFRV TPEIPAGLPS PRSE (SEQ ID NO: 186), where X is any amino acid other than Gly. In some cases, X is Ala;

[0455] PAGLLDLRQG MFAQLVAQNV LLIGGPLSWY SDPGLAGXSL TGGLSYKEDT KELVVAKAGV YYVFFQLELR RVVAGEGSGS VSLALHLQPL RSAAGAAALA LTVDLPPASS EARNSAFGFQ GRLLHLSAGQ RLGVHLHTEA RARHAWQLTQ GATVLGLFRV TPEIPAGLPS PRSE (SEQ ID NO: 187), where X is any amino acid other than Val. In some cases, X is Ala;

[0456] PAGLLDLRQG MFAQLVAQNV LLIGGPLSWY SDPGLAGVXL TGGLSYKEDT KELVVAKAGV YYVFFQLELR RVVAGEGSGS VSLALHLQPL RSAAGAAALA LTVDLPPASS EARNSAFGFQ GRLLHLSAGQ RLGVHLHTEA RARHAWQLTQ GATVLGLFRV TPEIPAGLPS PRSE (SEQ ID NO: 188), where X is any amino acid other than Ser. In some cases, X is Ala;

[0457] PAGLLDLRQG MFAQLVAQNV LLIGGPLSWY SDPGLAGVSX TGGLSYKEDT KELVVAKAGV YYVFFQLELR RVVAGEGSGS VSLALHLQPL RSAAGAAALA LTVDLPPASS EARNSAFGFQ GRLLHLSAGQ RLGVHLHTEA RARHAWQLTQ GATVLGLFRV TPEIPAGLPS PRSE (SEQ ID NO: 189), where X is any amino acid other than Leu. In some cases, X is Ala;

[0458] PAGLLDLRQG MFAQLVAQNV LLIGGPLSWY SDPGLAGVSL XGGLSYKEDT KELVVAKAGV YYVFFQLELR RVVAGEGSGS VSLALHLQPL RSAAGAAALA LTVDLPPASS EARNSAFGFQ GRLLHLSAGQ RLGVHLHTEA RARHAWQLTQ GATVLGLFRV TPEIPAGLPS PRSE (SEQ ID NO: 190), where X is any amino acid other than Thr. In some cases, X is Ala;

[0459] PAGLLDLRQG MFAQLVAQNV LLIGGPLSWY SDPGLAGVSL TXGLSYKEDT KELVVAKAGV YYVFFQLELR RVVAGEGSGS VSLALHLQPL RSAAGAAALA LTVDLPPASS EARNSAFGFQ GRLLHLSAGQ RLGVHLHTEA RARHAWQLTQ GATVLGLFRV TPEIPAGLPS PRSE (SEQ ID NO:191), where X is any amino acid other than Gly. In some cases, X is Ala;

[0460] PAGLLDLRQG MFAQLVAQNV LLIGGPLSWY SDPGLAGVSL TGXLSYKEDT KELVVAKAGV YYVFFQLELR RVVAGEGSGS VSLALHLQPL RSAAGAAALA LTVDLPPASS EARNSAFGFQ GRLLHLSAGQ RLGVHLHTEA RARHAWQLTQ GATVLGLFRV TPEIPAGLPS PRSE (SEQ ID NO: 192), where X is any amino acid other than Gly. In some cases, X is Ala;

[0461] PAGLLDLRQG MFAQLVAQNV LLIGGPLSWY SDPGLAGVSL TGGXSYKEDT KELVVAKAGV YYVFFQLELR RVVAGEGSGS VSLALHLQPL RSAAGAAALA LTVDLPPASS EARNSAFGFQ GRLLHLSAGQ RLGVHLHTEA RARHAWQLTQ GATVLGLFRV TPEIPAGLPS PRSE (SEQ ID NO: 193), where X is any amino acid other than Leu. In some cases, X is Ala;

[0462] PAGLLDLRQG MFAQLVAQNV LLIGGPLSWY SDPGLAGVSL TGGLXYKEDT KELVVAKAGV YYVFFQLELR RVVAGEGSGS VSLALHLQPL RSAAGAAALA LTVDLPPASS EARNSAFGFQ GRLLHLSAGQ RLGVHLHTEA RARHAWQLTQ GATVLGLFRV TPEIPAGLPS PRSE (SEQ ID NO: 194), where X is any amino acid other than Ser. In some cases, X is Ala;

[0463] PAGLLDLRQG MFAQLVAQNV LLIGGPLSWY SDPGLAGVSL TGGLSXKEDT KELVVAKAGV YYVFFQLELR RVVAGEGSGS VSLALHLQPL RSAAGAAALA LTVDLPPASS EARNSAFGFQ GRLLHLSAGQ RLGVHLHTEA RARHAWQLTQ GATVLGLFRV TPEIPAGLPS PRSE (SEQ ID NO: 195), where X is any amino acid other than Tyr. In some cases, X is Ala;

[0464] PAGLLDLRQG MFAQLVAQNV LLIGGPLSWY SDPGLAGVSL TGGLSYKXDT KELVVAKAGV YYVFFQLELR RVVAGEGSGS VSLALHLQPL RSAAGAAALA LTVDLPPASS EARNSAFGFQ GRLLHLSAGQ RLGVHLHTEA RARHAWQLTQ GATVLGLFRV TPEIPAGLPS PRSE (SEQ ID NO: 196), where X is any amino acid other than Glu. In some cases, X is Ala;

[0465] PAGLLDLRQG MFAQLVAQNV LLIGGPLSWY SDPGLAGVSL TGGLSYKEXT KELVVAKAGV YYVFFQLELR RVVAGEGSGS VSLALHLQPL RSAAGAAALA LTVDLPPASS EARNSAFGFQ GRLLHLSAGQ RLGVHLHTEA RARHAWQLTQ GATVLGLFRV TPEIPAGLPS PRSE (SEQ ID NO: 197), where X is any amino acid other than Asp. In some cases, X is Ala;

[0466] PAGLLDLRQG MFAQLVAQNV LLIGGPLSWY SDPGLAGVSL TGGLSYKEDX KELVVAKAGV YYVFFQLELR RVVAGEGSGS VSLALHLQPL RSAAGAAALA LTVDLPPASS EARNSAFGFQ GRLLHLSAGQ RLGVHLHTEA RARHAWQLTQ GATVLGLFRV TPEIPAGLPS PRSE (SEQ ID NO: 198), where X is any amino acid other than Thr. In some cases, X is Ala;

[0467] PAGLLDLRQG MFAQLVAQNV LLIGGPLSWY SDPGLAGVSL TGGLSYKEDT XELVVAKAGV YYVFFQLELR RVVAGEGSGS VSLALHLQPL RSAAGAAALA LTVDLPPASS EARNSAFGFQ GRLLHLSAGQ RLGVHLHTEA RARHAWQLTQ GATVLGLFRV TPEIPAGLPS PRSE (SEQ ID NO: 199), where X is any amino acid other than Lys. In some cases, X is Ala;

[0468] PAGLLDLRQG MFAQLVAQNV LLIGGPLSWY SDPGLAGVSL TGGLSYKEDT KXLVVAKAGV YYVFFQLELR RVVAGEGSGS VSLALHLQPL RSAAGAAALA LTVDLPPASS EARNSAFGFQ GRLLHLSAGQ RLGVHLHTEA RARHAWQLTQ GATVLGLFRV TPEIPAGLPS PRSE (SEQ ID NO: 200), where X is any amino acid other than Glu. In some cases, X is Ala;

[0469] PAGLLDLRQG MFAQLVAQNV LLIGGPLSWY SDPGLAGVSL TGGLSYKEDT KELVVAKAGV YYVXFQLELR RVVAGEGSGS VSLALHLQPL RSAAGAAALA LTVDLPPASS EARNSAFGFQ GRLLHLSAGQ RLGVHLHTEA RARHAWQLTQ GATVLGLFRV TPEIPAGLPS PRSE (SEQ ID NO: 201), where X is any amino acid other than Phe. In some cases, X is Ala;

[0470] PAGLLDLRQG MFAQLVAQNV LLIGGPLSWY SDPGLAGVSL TGGLSYKEDT KELVVAKAGV YYVFXQLELR RVVAGEGSGS VSLALHLQPL RSAAGAAALA LTVDLPPASS EARNSAFGFQ GRLLHLSAGQ RLGVHLHTEA RARHAWQLTQ GATVLGLFRV TPEIPAGLPS PRSE (SEQ ID NO: 202), where X is any amino acid other than Phe. In some cases, X is Ala;

[0471] PAGLLDLRQG MFAQLVAQNV LLIGGPLSWY SDPGLAGVSL TGGLSYKEDT KELVVAKAGV YYVFFXLELR RVVAGEGSGS VSLALHLQPL RSAAGAAALA LTVDLPPASS EARNSAFGFQ GRLLHLSAGQ RLGVHLHTEA RARHAWQLTQ GATVLGLFRV TPEIPAGLPS PRSE (SEQ ID NO: 203), where X is any amino acid other than Gln. In some cases, X is Ala;

[0472] PAGLLDLRQG MFAQLVAQNV LLIGGPLSWY SDPGLAGVSL TGGLSYKEDT KELVVAKAGV YYVFFQXELR RVVAGEGSGS VSLALHLQPL RSAAGAAALA LTVDLPPASS EARNSAFGFQ GRLLHLSAGQ RLGVHLHTEA RARHAWQLTQ GATVLGLFRV TPEIPAGLPS PRSE (SEQ ID NO: 204), where X is any amino acid other than Leu. In some cases, X is Ala;

[0473] PAGLLDLRQG MFAQLVAQNV LLIGGPLSWY SDPGLAGVSL TGGLSYKEDT KELVVAKAGV YYVFFQLXLR RVVAGEGSGS VSLALHLQPL RSAAGAAALA LTVDLPPASS EARNSAFGFQ GRLLHLSAGQ RLGVHLHTEA RARHAWQLTQ GATVLGLFRV TPEIPAGLPS PRSE (SEQ ID NO: 205), where X is any amino acid other than Glu. In some cases, X is Ala;

[0474] PAGLLDLRQG MFAQLVAQNV LLIGGPLSWY SDPGLAGVSL TGGLSYKEDT KELVVAKAGV YYVFFQLEXR RVVAGEGSGS VSLALHLQPL RSAAGAAALA LTVDLPPASS EARNSAFGFQ GRLLHLSAGQ RLGVHLHTEA RARHAWQLTQ GATVLGLFRV TPEIPAGLPS PRSE (SEQ ID NO: 206), where X is any amino acid other than Leu. In some cases, X is Ala;

[0475] PAGLLDLRQG MFAQLVAQNV LLIGGPLSWY SDPGLAGVSL TGGLSYKEDT KELVVAKAGV YYVFFQLELX RVVAGEGSGS VSLALHLQPL RSAAGAAALA LTVDLPPASS EARNSAFGFQ GRLLHLSAGQ RLGVHLHTEA RARHAWQLTQ GATVLGLFRV TPEIPAGLPS PRSE (SEQ ID NO: 207), where X is any amino acid other than Arg. In some cases, X is Ala;

[0476] PAGLLDLRQG MFAQLVAQNV LLIGGPLSWY SDPGLAGVSL TGGLSYKEDT KELVVAKAGV YYVFFQLELR XVVAGEGSGS VSLALHLQPL RSAAGAAALA LTVDLPPASS EARNSAFGFQ GRLLHLSAGQ RLGVHLHTEA RARHAWQLTQ GATVLGLFRV TPEIPAGLPS PRSE (SEQ ID NO: 208), where X is any amino acid other than Arg. In some cases, X is Ala;

[0477] PAGLLDLRQG MFAQLVAQNV LLIGGPLSWY SDPGLAGVSL TGGLSYKEDT KELVVAKAGV YYVFFQLELR RXVAGEGSGS VSLALHLQPL RSAAGAAALA LTVDLPPASS EARNSAFGFQ GRLLHLSAGQ RLGVHLHTEA RARHAWQLTQ GATVLGLFRV TPEIPAGLPS PRSE (SEQ ID NO: 209), where X is any amino acid other than Val. In some cases, X is Ala;

[0478] PAGLLDLRQG MFAQLVAQNV LLIGGPLSWY SDPGLAGVSL TGGLSYKEDT KELVVAKAGV YYVFFQLELR RVXAGEGSGS VSLALHLQPL RSAAGAAALA LTVDLPPASS EARNSAFGFQ GRLLHLSAGQ RLGVHLHTEA RARHAWQLTQ GATVLGLFRV TPEIPAGLPS PRSE (SEQ ID NO: 210), where X is any amino acid other than Val. In some cases, X is Ala;

[0479] PAGLLDLRQG MFAQLVAQNV LLIGGPLSWY SDPGLAGVSL TGGLSYKEDT KELVVAKAGV YYVFFQLELR RVVAXEGSGS VSLALHLQPL RSAAGAAALA LTVDLPPASS EARNSAFGFQ GRLLHLSAGQ RLGVHLHTEA RARHAWQLTQ GATVLGLFRV TPEIPAGLPS PRSE (SEQ ID NO: 211), where X is any amino acid other than Gly. In some cases, X is Ala;

[0480] PAGLLDLRQG MFAQLVAQNV LLIGGPLSWY SDPGLAGVSL TGGLSYKEDT KELVVAKAGV YYVFFQLELR RVVAGXGSGS VSLALHLQPL RSAAGAAALA LTVDLPPASS EARNSAFGFQ GRLLHLSAGQ RLGVHLHTEA RARHAWQLTQ GATVLGLFRV TPEIPAGLPS PRSE (SEQ ID NO: 212), where X is any amino acid other than Glu. In some cases, X is Ala;

[0481] PAGLLDLRQG MFAQLVAQNV LLIGGPLSWY SDPGLAGVSL TGGLSYKEDT KELVVAKAGV YYVFFQLELR RVVAGEXSGS VSLALHLQPL RSAAGAAALA LTVDLPPASS EARNSAFGFQ GRLLHLSAGQ RLGVHLHTEA RARHAWQLTQ GATVLGLFRV TPEIPAGLPS PRSE (SEQ ID NO: 213), where X is any amino acid other than Gly. In some cases, X is Ala;

[0482] PAGLLDLRQG MFAQLVAQNV LLIGGPLSWY SDPGLAGVSL TGGLSYKEDT KELVVAKAGV YYVFFQLELR RVVAGEGXGS VSLALHLQPL RSAAGAAALA LTVDLPPASS EARNSAFGFQ GRLLHLSAGQ RLGVHLHTEA RARHAWQLTQ GATVLGLFRV TPEIPAGLPS PRSE (SEQ ID NO: 214), where X is any amino acid other than Ser. In some cases, X is Ala;

[0483] PAGLLDLRQG MFAQLVAQNV LLIGGPLSWY SDPGLAGVSL TGGLSYKEDT KELVVAKAGV YYVFFQLELR RVVAGEGSGS VSLALHLQPL RSAAGAAALA LTVXLPPASS EARNSAFGFQ GRLLHLSAGQ RLGVHLHTEA RARHAWQLTQ GATVLGLFRV TPEIPAGLPS PRSE (SEQ ID NO: 215), where X is any amino acid other than Asp. In some cases, X is Ala;

[0484] PAGLLDLRQG MFAQLVAQNV LLIGGPLSWY SDPGLAGVSL TGGLSYKEDT KELVVAKAGV YYVFFQLELR RVVAGEGSGS VSLALHLQPL RSAAGAAALA LTVDXPPASS EARNSAFGFQ GRLLHLSAGQ RLGVHLHTEA RARHAWQLTQ GATVLGLFRV TPEIPAGLPS PRSE (SEQ ID NO: 216), where X is any amino acid other than Leu. In some cases, X is Ala;

[0485] PAGLLDLRQG MFAQLVAQNV LLIGGPLSWY SDPGLAGVSL TGGLSYKEDT KELVVAKAGV YYVFFQLELR RVVAGEGSGS VSLALHLQPL RSAAGAAALA LTVDLXPASS EARNSAFGFQ GRLLHLSAGQ RLGVHLHTEA RARHAWQLTQ GATVLGLFRV TPEIPAGLPS PRSE (SEQ ID NO: 217), where X is any amino acid other than Pro. In some cases, X is Ala;

[0486] PAGLLDLRQG MFAQLVAQNV LLIGGPLSWY SDPGLAGVSL TGGLSYKEDT KELVVAKAGV YYVFFQLELR RVVAGEGSGS VSLALHLQPL RSAAGAAALA LTVDLPPAXS EARNSAFGFQ GRLLHLSAGQ RLGVHLHTEA RARHAWQLTQ GATVLGLFRV TPEIPAGLPS PRSE (SEQ ID NO: 218), where X is any amino acid other than Ser. In some cases, X is Ala;

[0487] PAGLLDLRQG MFAQLVAQNV LLIGGPLSWY SDPGLAGVSL TGGLSYKEDT KELVVAKAGV YYVFFQLELR RVVAGEGSGS VSLALHLQPL RSAAGAAALA LTVDLPPASX EARNSAFGFQ GRLLHLSAGQ RLGVHLHTEA RARHAWQLTQ GATVLGLFRV TPEIPAGLPS PRSE (SEQ ID NO: 219), where X is any amino acid other than Ser. In some cases, X is Ala;

[0488] PAGLLDLRQG MFAQLVAQNV LLIGGPLSWY SDPGLAGVSL TGGLSYKEDT KELVVAKAGV YYVFFQLELR RVVAGEGSGS VSLALHLQPL RSAAGAAALA LTVDLPPASS XARNSAFGFQ GRLLHLSAGQ RLGVHLHTEA RARHAWQLTQ GATVLGLFRV TPEIPAGLPS PRSE (SEQ ID NO: 220), where X is any amino acid other than Glu. In some cases, X is Ala;

[0489] PAGLLDLRQG MFAQLVAQNV LLIGGPLSWY SDPGLAGVSL TGGLSYKEDT KELVVAKAGV YYVFFQLELR RVVAGEGSGS VSLALHLQPL RSAAGAAALA LTVDLPPASS EAXNSAFGFQ GRLLHLSAGQ RLGVHLHTEA RARHAWQLTQ GATVLGLFRV TPEIPAGLPS PRSE (SEQ ID NO: 221), where X is any amino acid other than Arg. In some cases, X is Ala;

[0490] PAGLLDLRQG MFAQLVAQNV LLIGGPLSWY SDPGLAGVSL TGGLSYKEDT KELVVAKAGV YYVFFQLELR RVVAGEGSGS VSLALHLQPL RSAAGAAALA LTVDLPPASS EARXSAFGFQ GRLLHLSAGQ RLGVHLHTEA RARHAWQLTQ GATVLGLFRV TPEIPAGLPS PRSE (SEQ ID NO: 222), where X is any amino acid other than Asn. In some cases, X is Ala;

[0491] PAGLLDLRQG MFAQLVAQNV LLIGGPLSWY SDPGLAGVSL TGGLSYKEDT KELVVAKAGV YYVFFQLELR RVVAGEGSGS VSLALHLQPL RSAAGAAALA LTVDLPPASS EARNXAFGFQ GRLLHLSAGQ RLGVHLHTEA RARHAWQLTQ GATVLGLFRV TPEIPAGLPS PRSE (SEQ ID NO: 223), where X is any amino acid other than Ser. In some cases, X is Ala;

[0492] PAGLLDLRQG MFAQLVAQNV LLIGGPLSWY SDPGLAGVSL TGGLSYKEDT KELVVAKAGV YYVFFQLELR RVVAGEGSGS VSLALHLQPL RSAAGAAALA LTVDLPPASS EARNSAXGFQ GRLLHLSAGQ RLGVHLHTEA RARHAWQLTQ GATVLGLFRV TPEIPAGLPS PRSE (SEQ ID NO: 224), where X is any amino acid other than Phe. In some cases, X is Ala;

[0493] PAGLLDLRQG MFAQLVAQNV LLIGGPLSWY SDPGLAGVSL TGGLSYKEDT KELVVAKAGV YYVFFQLELR RVVAGEGSGS VSLALHLQPL RSAAGAAALA LTVDLPPASS EARNSAFGFQ GRLLHLSAGX RLGVHLHTEA RARHAWQLTQ GATVLGLFRV TPEIPAGLPS PRSE (SEQ ID NO: 225), where X is any amino acid other than Gln. In some cases, X is Ala;

[0494] PAGLLDLRQG MFAQLVAQNV LLIGGPLSWY SDPGLAGVSL TGGLSYKEDT KELVVAKAGV YYVFFQLELR RVVAGEGSGS VSLALHLQPL RSAAGAAALA LTVDLPPASS EARNSAFGFQ GRLLHLSAGQ XLGVHLHTEA RARHAWQLTQ GATVLGLFRV TPEIPAGLPS PRSE (SEQ ID NO: 226), where X is any amino acid other than Arg. In some cases, X is Ala;

[0495] PAGLLDLRQG MFAQLVAQNV LLIGGPLSWY SDPGLAGVSL TGGLSYKEDT KELVVAKAGV YYVFFQLELR RVVAGEGSGS VSLALHLQPL RSAAGAAALA LTVDLPPASS EARNSAFGFQ GRLLHLSAGQ RXGVHLHTEA RARHAWQLTQ GATVLGLFRV TPEIPAGLPS PRSE (SEQ ID NO: 227), where X is any amino acid other than Leu. In some cases, X is Ala;

[0496] PAGLLDLRQG MFAQLVAQNV LLIGGPLSWY SDPGLAGVSL TGGLSYKEDT KELVVAKAGV YYVFFQLELR RVVAGEGSGS VSLALHLQPL RSAAGAAALA LTVDLPPASS EARNSAFGFQ GRLLHLSAGQ RLXVHLHTEA RARHAWQLTQ GATVLGLFRV TPEIPAGLPS PRSE (SEQ ID NO: 228), where X is any amino acid other than Gly. In some cases, X is Ala;

[0497] PAGLLDLRQG MFAQLVAQNV LLIGGPLSWY SDPGLAGVSL TGGLSYKEDT KELVVAKAGV YYVFFQLELR RVVAGEGSGS VSLALHLQPL RSAAGAAALA LTVDLPPASS EARNSAFGFQ GRLLHLSAGQ RLGXHLHTEA RARHAWQLTQ GATVLGLFRV TPEIPAGLPS PRSE (SEQ ID NO: 229), where X is any amino acid other than Val. In some cases, X is Ala;

[0498] PAGLLDLRQG MFAQLVAQNV LLIGGPLSWY SDPGLAGVSL TGGLSYKEDT KELVVAKAGV YYVFFQLELR RVVAGEGSGS VSLALHLQPL RSAAGAAALA LTVDLPPASS EARNSAFGFQ GRLLHLSAGQ RLGVXLHTEA RARHAWQLTQ GATVLGLFRV TPEIPAGLPS PRSE (SEQ ID NO: 230), where X is any amino acid other than His. In some cases, X is Ala;

[0499] PAGLLDLRQG MFAQLVAQNV LLIGGPLSWY SDPGLAGVSL TGGLSYKEDT KELVVAKAGV YYVFFQLELR RVVAGEGSGS VSLALHLQPL RSAAGAAALA LTVDLPPASS EARNSAFGFQ GRLLHLSAGQ RLGVHXHTEA RARHAWQLTQ GATVLGLFRV TPEIPAGLPS PRSE (SEQ ID NO: 231), where X is any amino acid other than Leu. In some cases, X is Ala;

[0500] PAGLLDLRQG MFAQLVAQNV LLIGGPLSWY SDPGLAGVSL TGGLSYKEDT KELVVAKAGV YYVFFQLELR RVVAGEGSGS VSLALHLQPL RSAAGAAALA LTVDLPPASS EARNSAFGFQ GRLLHLSAGQ RLGVHLXTEA RARHAWQLTQ GATVLGLFRV TPEIPAGLPS PRSE (SEQ ID NO: 232), where X is any amino acid other than His. In some cases, X is Ala;

[0501] PAGLLDLRQG MFAQLVAQNV LLIGGPLSWY SDPGLAGVSL TGGLSYKEDT KELVVAKAGV YYVFFQLELR RVVAGEGSGS VSLALHLQPL RSAAGAAALA LTVDLPPASS EARNSAFGFQ GRLLHLSAGQ RLGVHLHXEA RARHAWQLTQ GATVLGLFRV TPEIPAGLPS PRSE (SEQ ID NO: 233), where X is any amino acid other than Thr. In some cases, X is Ala;

[0502] PAGLLDLRQG MFAQLVAQNV LLIGGPLSWY SDPGLAGVSL TGGLSYKEDT KELVVAKAGV YYVFFQLELR RVVAGEGSGS VSLALHLQPL RSAAGAAALA LTVDLPPASS EARNSAFGFQ GRLLHLSAGQ RLGVHLHTXA RARHAWQLTQ GATVLGLFRV TPEIPAGLPS PRSE (SEQ ID NO: 234), where X is any amino acid other than Glu. In some cases, X is Ala;

[0503] PAGLLDLRQG MFAQLVAQNV LLIGGPLSWY SDPGLAGVSL TGGLSYKEDT KELVVAKAGV YYVFFQLELR RVVAGEGSGS VSLALHLQPL RSAAGAAALA LTVDLPPASS EARNSAFGFQ GRLLHLSAGQ RLGVHLHTEA XARHAWQLTQ GATVLGLFRV TPEIPAGLPS PRSE (SEQ ID NO: 235), where X is any amino acid other than Arg. In some cases, X is Ala;

[0504] PAGLLDLRQG MFAQLVAQNV LLIGGPLSWY SDPGLAGVSL TGGLSYKEDT KELVVAKAGV YYVFFQLELR RVVAGEGSGS VSLALHLQPL RSAAGAAALA LTVDLPPASS EARNSAFGFQ GRLLHLSAGQ RLGVHLHTEA RAXHAWQLTQ GATVLGLFRV TPEIPAGLPS PRSE (SEQ ID NO: 236), where X is any amino acid other than Arg. In some cases, X is Ala;

[0505] PAGLLDLRQG MFAQLVAQNV LLIGGPLSWY SDPGLAGVSL TGGLSYKEDT KELVVAKAGV YYVFFQLELR RVVAGEGSGS VSLALHLQPL RSAAGAAALA LTVDLPPASS EARNSAFGFQ GRLLHLSAGQ RLGVHLHTEA RARXAWQLTQ GATVLGLFRV TPEIPAGLPS PRSE (SEQ ID NO: 237), where X is any amino acid other than His. In some cases, X is Ala;

[0506] PAGLLDLRQG MFAQLVAQNV LLIGGPLSWY SDPGLAGVSL TGGLSYKEDT KELVVAKAGV YYVFFQLELR RVVAGEGSGS VSLALHLQPL RSAAGAAALA LTVDLPPASS EARNSAFGFQ GRLLHLSAGQ RLGVHLHTEA RARHAXQLTQ GATVLGLFRV TPEIPAGLPS PRSE (SEQ ID NO: 238), where X is any amino acid other than Trp. In some cases, X is Ala;

[0507] PAGLLDLRQG MFAQLVAQNV LLIGGPLSWY SDPGLAGVSL TGGLSYKEDT KELVVAKAGV YYVFFQLELR RVVAGEGSGS VSLALHLQPL RSAAGAAALA LTVDLPPASS EARNSAFGFQ GRLLHLSAGQ RLGVHLHTEA RARHAWQXTQ GATVLGLFRV TPEIPAGLPS PRSE (SEQ ID NO: 239), where X is any amino acid other than Leu. In some cases, X is Ala;

[0508] PAGLLDLRQG MFAQLVAQNV LLIGGPLSWY SDPGLAGVSL TGGLSYKEDT KELVVAKAGV YYVFFQLELR RVVAGEGSGS VSLALHLQPL RSAAGAAALA LTVDLPPASS EARNSAFGFQ GRLLHLSAGQ RLGVHLHTEA RARHAWQLXQ GATVLGLFRV TPEIPAGLPS PRSE (SEQ ID NO: 240), where X is any amino acid other than Thr. In some cases, X is Ala;

[0509] PAGLLDLRQG MFAQLVAQNV LLIGGPLSWY SDPGLAGVSL TGGLSYKEDT KELVVAKAGV YYVFFQLELR RVVAGEGSGS VSLALHLQPL RSAAGAAALA LTVDLPPASS EARNSAFGFQ GRLLHLSAGQ RLGVHLHTEA RARHAWQLTX GATVLGLFRV TPEIPAGLPS PRSE (SEQ ID NO: 241), where X is any amino acid other than Gln. In some cases, X is Ala;

[0510] PAGLLDLRQG MFAQLVAQNV LLIGGPLSWY SDPGLAGVSL TGGLSYKEDT KELVVAKAGV YYVFFQLELR RVVAGEGSGS VSLALHLQPL RSAAGAAALA LTVDLPPASS EARNSAFGFQ GRLLHLSAGQ RLGVHLHTEA RARHAWQLTQ XATVLGLFRV TPEIPAGLPS PRSE (SEQ ID NO: 242), where X is any amino acid other than Gly. In some cases, X is Ala;

[0511] PAGLLDLRQG MFAQLVAQNV LLIGGPLSWY SDPGLAGVSL TGGLSYKEDT KELVVAKAGV YYVFFQLELR RVVAGEGSGS VSLALHLQPL RSAAGAAALA LTVDLPPASS EARNSAFGFQ GRLLHLSAGQ RLGVHLHTEA RARHAWQLTQ GAXVLGLFRV TPEIPAGLPS PRSE (SEQ ID NO: 243), where X is any amino acid other than Thr. In some cases, X is Ala; and

[0512] PAGLLDLRQG MFAQLVAQNV LLIGGPLSWY SDPGLAGVSL TGGLSYKEDT KELVVAKAGV YYVFFQLELR RVVAGEGSGS VSLALHLQPL RSAAGAAALA LTVDLPPASS EARNSAFGFQ GRLLHLSAGQ RLGVHLHTEA RARHAWQLTQ GATXLGLFRV TPEIPAGLPS PRSE (SEQ ID NO: 244), where X is any amino acid other than Val. In some cases, X is Ala.

### IL-2 Variants

[0513] In some cases, a variant immunomodulatory polypeptide present in a TMAPP of the present disclosure is a variant IL-2 polypeptide. Wild-type IL-2 binds to IL-2 receptor (IL-2R).

[0514] A wild-type IL-2 amino acid sequence can be as follows: APTSSSTKKT QLQLEHLLLD LQMILNGINN YKNPKLTRML TFKFYMPKKA TELKHLQCLEEELKPLEEVL NLAQSKNFHL RPRDLISNIN VIVLELKGSE TTFMCEYADE TATIVEFLNRWITFCQSIIS TLT (SEQ ID NO: 245).

[0515] Wild-type IL2 binds to an IL2 receptor (IL2R) on the surface of a cell. An IL2 receptor is in some cases a heterotrimeric polypeptide comprising an alpha chain (IL-2Rα; also referred to as CD25), a beta chain (IL-2Rβ; also referred to as CD122: and a gamma chain (IL-2Rγ; also referred to as CD132) Amino acid sequences of human IL-2Rα, IL2Rβ, and IL-2Rγ can be as follows.

Human IL-2Rα:
(SEQ ID NO: 246)
ELCDDDPPE IPHATFKAMA YKEGTMLNCE CKRGFRRIKS
GSLYMLCTGN SSHSSWDNQC QCTSSATRNT TKQVTPQPEE
QKERKTTEMQ SPMQPVDQAS LPGHCREPPP WENEATERIY
HFVVGQMVYY QCVQGYRALH RGPAESVCKM THGKTRWTQP
QLICTGEMET SQFPGEEKPQ ASPEGRPESE TSCLVTTTDF
QIQTEMAATM ETSIFTTEYQ VAVAGCVFLL ISVLLLSGLT
WQRRQRKSRR TI.
Human IL-2Rβ:
(SEQ ID NO: 247)
VNG TSQFTCFYNS RANISCVWSQ DGALQDTSCQ VHAWPDRRRW
NQTCELLPVS QASWACNLIL GAPDSQKLTT VDIVTLRVLC
REGVRWRVMA IQDFKPFENL RLMAPISLQV VHVETHRCNI
SWEISQASHY FERHLEFEAR TLSPGHTWEE APLLTLKQKQ
EWICLETLTP DTQYEFQVRV KPLQGEFTTW SPWSQPLAFR
TKPAALGKDT IPWLGHLLVG LSGAFGFIIL VYLLINCRNT
GPWLKKVLKC NTPDPSKFFS QLSSEHGGDV QKWLSSPFPS
SSFSPGGLAP EISPLEVLER DKVTQLLLQQ DKVPEPASLS
SNHSLTSCFT NQGYFFFHLP DALEIEACQV YFTYDPYSEE
DPDEGVAGAP TGSSPQPLQP LSGEDDAYCT FPSRDDLLLF
SPSLLGGPSP PSTAPGGSGA GEERMPPSLQ ERVPRDWDPQ
PLGPPTPGVP DLVDFQPPPE LVLREAGEEV PDAGPREGVS
FPWSRPPGQG EFRALNARLP LNTDAYLSLQ ELQGQDPTHL V.
Human IL-2Rγ:
(SEQ ID NO: 248)
LNTTILTP NGNEDTTADF FLTTMPTDSL SVSTLPLPEV
QCFVFNVEYM NCTWNSSSEP QPTNLTLHYW YKNSDNDKVQ
KCSHYLFSEE ITSGCQLQKK EIHLYQTFVV QLQDPREPRR
QATQMLKLQN LVIPWAPENL TLHKLSESQL ELNWNNRFLN
HCLEHLVQYR TDWDHSWTEQ SVDYRHKFSL PSVDGQKRYT
FRVRSRFNPL CGSAQHWSEW SHPIHWGSNT SKENPFLFAL
EAVVISVGSM GLIISLLCVY FWLERTMPRI PTLKNLEDLV
TEYHGNFSAW SGVSKGLAES LQPDYSERLC LVSEIPPKGG
ALGEGPGASP CNQHSPYWAP PCYTLKPET.

[0516] In some cases, where a TMAPP of the present disclosure comprises a variant IL-2 polypeptide, a “cognate co-immunomodulatory polypeptide” is an IL-2R comprising polypeptides comprising the amino acid sequences of SEQ ID NO: 246, 247, and 248.

[0517] In some cases, a variant IL-2 polypeptide exhibits reduced binding affinity to IL-2R, compared to the binding affinity of a IL-2 polypeptide comprising the amino acid sequence set forth in SEQ ID NO: 245. For example, in some cases, a variant IL-2 polypeptide binds IL-2R with a binding affinity that is at least 10% less, at least 15% less, at least 20% less, at least 25%, at least 30% less, at least 35% less, at least 40% less, at least 45% less, at least 50% less, at least 55% less, at least 60% less, at least 65% less, at least 70% less, at least 75% less, at least 80% less, at least 85% less, at least 90% less, at least 95% less, or more than 95% less, than the binding affinity of an IL-2 polypeptide comprising the amino acid sequence set forth in SEQ ID NO: 245 for an IL-2R (e.g., an IL-2R comprising polypeptides comprising the amino acid sequence set forth in SEQ ID NOs: 246-248), when assayed under the same conditions.

[0518] In some cases, a variant IL-2 polypeptide has a binding affinity to IL-2R that is from 100 nM to 100 μM. As another example, in some cases, a variant IL-2 polypeptide has a binding affinity for IL-2R (e.g., an IL-2R comprising polypeptides comprising the amino acid sequence set forth in SEQ ID NOs: 246-248) that is from about 100 nM to 150 nM, from about 150 nM to about 200 nM, from about 200 nM to about 250 nM, from about 250 nM to about 300 nM, from about 300 nM to about 350 nM, from about 350 nM to about 400 nM, from about 400 nM to about 500 nM, from about 500 nM to about 600 nM, from about 600 nM to about 700 nM, from about 700 nM to about 800 nM, from about 800 nM to about 900 nM, from about 900 nM to about 1 μM, to about 1 μM to about 5 μM, from about 5 μM to about 10 μM, from about 10 μM to about 15 μM, from about 15 μM to about 20 μM, from about 20 μM to about 25 μM, from about 25 μM to about 50 μM, from about 50 μM to about 75 μM, or from about 75 μM to about 100 μM.

[0519] In some cases, a variant IL-2 polypeptide has a single amino acid substitution compared to the IL-2 amino acid sequence set forth in SEQ ID NO: 245. In some cases, a variant IL-2 polypeptide has from 2 to 10 amino acid substitutions compared to the IL-2 amino acid sequence set forth in SEQ ID NO: 245. In some cases, a variant IL-2 polypeptide has 2 amino acid substitutions compared to the IL-2 amino acid sequence set forth in SEQ ID NO: 245. In some cases, a variant IL-2 polypeptide has 3 amino acid substitutions compared to the IL-2 amino acid sequence set forth in SEQ ID NO: 245. In some cases, a variant IL-2 polypeptide has 4 amino acid substitutions compared to the IL-2 amino acid sequence set forth in SEQ ID NO: 245. In some cases, a variant IL-2 polypeptide has 5 amino acid substitutions compared to the IL-2 amino acid sequence set forth in SEQ ID NO: 245. In some cases, a variant IL-2 polypeptide has 6 amino acid substitutions compared to the IL-2 amino acid sequence set forth in SEQ ID NO: 245. In some cases, a variant IL-2 polypeptide has 7 amino acid substitutions compared to the IL-2 amino acid sequence set forth in SEQ ID NO: 245. In some cases, a variant IL-2 polypeptide has 8 amino acid substitutions compared to the IL-2 amino acid sequence set forth in SEQ ID NO: 245. In some cases, a variant IL-2 polypeptide has 9 amino acid substitutions compared to the IL-2 amino acid sequence set forth in SEQ ID NO: 245. In some cases, a variant IL-2 polypeptide has 10 amino acid substitutions compared to the IL-2 amino acid sequence set forth in SEQ ID NO: 245.

[0520] Suitable IL-2 variants include a polypeptide that comprises an amino acid sequence having at least 90%, at least 95%, at least 98%, at least 99%, or 100%, amino acid sequence identity to any one of the following amino acid sequences:

[0521] APTSSSTKKT QLQLEHLLLD LQMILNGINN YKNPKLTRML TXKFYMPKKA TELKHLQCLE EELKPLEEVL NLAQSKNFHL RPRDLISNIN VIVLELKGSE TTFMCEYADE TATIVEFLNR WITFCQSIIS TLT (SEQ ID NO: 249), where X is any amino acid other than Phe. In some cases, X is Ala;

[0522] APTSSSTKKT QLQLEHLLLX LQMILNGINN YKNPKLTRML TFKFYMPKKA TELKHLQCLE EELKPLEEVL NLAQSKNFHL RPRDLISNIN VIVLELKGSE TTFMCEYADE TATIVEFLNR WITFCQSIIS TLT (SEQ ID NO: 250), where X is any amino acid other than Asp. In some cases, X is Ala;

[0523] APTSSSTKKT QLQLXHLLLD LQMILNGINN YKNPKLTRML TFKFYMPKKA TELKHLQCLE EELKPLEEVL NLAQSKNFHL RPRDLISNIN VIVLELKGSE TTFMCEYADE TATIVEFLNR WITFCQSIIS TLT (SEQ ID NO: 251), where X is any amino acid other than Glu. In some cases, X is Ala;

[0524] APTSSSTKKT QLQLEXLLLD LQMILNGINN YKNPKLTRML TFKFYMPKKA TELKHLQCLE EELKPLEEVL NLAQSKNFHL RPRDLISNIN VIVLELKGSE TTFMCEYADE TATIVEFLNR WITFCQSIIS TLT (SEQ ID NO: 252), where X is any amino acid other than His. In some cases, X is Ala. In some cases, X is Arg. In some cases, X is Asn. In some cases, X is Asp. In some cases, X is Cys. In some cases, X is Glu. In some cases, X is Gln. In some cases, X is Gly. In some cases, X is Ile. In some cases, X is Lys. In some cases, X is Leu. In some cases, X is Met. In some cases, X is Phe. In some cases, X is Pro. In some cases, X is Ser. In some cases, X is Thr. In some cases, X is Tyr. In some cases, X is Trp. In some cases, X is Val;

[0525] APTSSSTKKT QLQLEHLLLD LQMILNGINN YKNPKLTRML TFKFXMPKKA TELKHLQCLE EELKPLEEVL NLAQSKNFHL RPRDLISNIN VIVLELKGSE TTFMCEYADE TATIVEFLNR WITFCQSIIS TLT (SEQ ID NO: 253), where X is any amino acid other than Tyr. In some cases, X is Ala;

[0526] APTSSSTKKT QLQLEHLLLD LQMILNGINN YKNPKLTRML TFKFYMPKKA TELKHLQCLE EELKPLEEVL NLAQSKNFHL RPRDLISNIN VIVLELKGSE TTFMCEYADE TATIVEFLNR WITFCXSIIS TLT (SEQ ID NO: 254), where X is any amino acid other than Gln. In some cases, X is Ala;

[0527] APTSSSTKKT QLQLEX₁LLLD LQMILNGINN YKNPKLTRML TX₂KFYMPKKA TELKHLQCLE EELKPLEEVL NLAQSKNFHL RPRDLISNIN VIVLELKGSE TTFMCEYADE TATIVEFLNR WITFCQSIIS TLT (SEQ ID NO: 255), where X₁ is any amino acid other than His, and where X₂ is any amino acid other than Phe. In some cases, X₁ is Ala. In some cases, X₂ is Ala. In some cases, X₁ is Ala; and X₂ is Ala. In some cases, X₁ is Thr; and X₂ is Ala;

[0528] APTSSSTKKT QLQLEHLLLX₁ LQMILNGINN YKNPKLTRML TX₂KFYMPKKA TELKHLQCLE EELKPLEEVL NLAQSKNFHL RPRDLISNIN VIVLELKGSE TTFMCEYADE TATIVEFLNR WITFCQSIIS TLT (SEQ ID NO: 256), where X₁ is any amino acid other than Asp; and where X₂ is any amino acid other than Phe. In some cases, X₁ is Ala. In some cases, X₂ is Ala. In some cases, X₁ is Ala; and X₂ is Ala;

[0529] APTSSSTKKT QLQLX₁HLLLX₂ LQMILNGINN YKNPKLTRML TX₃KFYMPKKA TELKHLQCLE EELKPLEEVL NLAQSKNFHL RPRDLISNIN VIVLELKGSE TTFMCEYADE TATIVEFLNR WITFCQSIIS TLT (SEQ ID NO: 257), where X₁ is any amino acid other than Glu; where X₂ is any amino acid other than Asp; and where X₃ is any amino acid other than Phe. In some cases, X₁ is Ala. In some cases, X₂ is Ala. In some cases, X₃ is Ala. In some cases, X₁ is Ala; X₂ is Ala; and X₃ is Ala;

[0530] APTSSSTKKT QLQLEX₁LLLX₂ LQMILNGINN YKNPKLTRML TX₃KFYMPKKA TELKHLQCLE EELKPLEEVL NLAQSKNFHL RPRDLISNIN VIVLELKGSE TTFMCEYADE TATIVEFLNR WITFCQSIIS TLT (SEQ ID NO: 258), where X₁ is any amino acid other than His; where X₂ is any amino acid other than Asp; and where X₃ is any amino acid other than Phe. In some cases, X₁ is Ala. In some cases, X₂ is Ala. In some cases, X₃ is Ala. In some cases, X₁ is Ala; X₂ is Ala; and X₃ is Ala;

[0531] APTSSSTKKT QLQLEHLLLX₁ LQMILNGINN YKNPKLTRML TX₂KFYMPKKA TELKHLQCLE EELKPLEEVL NLAQSKNFHL RPRDLISNIN VIVLELKGSE TTFMCEYADE TATIVEFLNR WITFCX₃SIIS TLT (SEQ ID NO: 259), where X₁ is any amino acid other than Asp; where X₂ is any amino acid other than Phe; and where X₃ is any amino acid other than Gln. In some cases, X₁ is Ala. In some cases, X₂ is Ala. In some cases, X₃ is Ala. In some cases, X₁ is Ala; X₂ is Ala; and X₃ is Ala;

[0532] APTSSSTKKT QLQLEHLLLX₁ LQMILNGINN YKNPKLTRML TX₂KFX₃MPKKA TELKHLQCLE EELKPLEEVL NLAQSKNFHL RPRDLISNIN VIVLELKGSE TTFMCEYADE TATIVEFLNR WITFCQSIIS TLT (SEQ ID NO: 260), where X₁ is any amino acid other than Asp; where X₂ is any amino acid other than Phe; and where X₃ is any amino acid other than Tyr. In some cases, X₁ is Ala. In some cases, X₂ is Ala. In some cases, X₃ is Ala. In some cases, X₁ is Ala; X₂ is Ala; and X₃ is Ala;

[0533] APTSSSTKKT QLQLEX₁LLLX₂ LQMILNGINN YKNPKLTRML TX₃KFX₄MPKKA TELKHLQCLE EELKPLEEVL NLAQSKNFHL RPRDLISNIN VIVLELKGSE TTFMCEYADE TATIVEFLNR WITFCQSIIS TLT (SEQ ID NO: 261), where X₁ is any amino acid other than His; where X₂ is any amino acid other than Asp; where X₃ is any amino acid other than Phe; and where X₄ is any amino acid other than Tyr. In some cases, X₁ is Ala. In some cases, X₂ is Ala. In some cases, X₃ is Ala. In some cases, X₄ is Ala. In some cases, X₁ is Ala; X₂ is Ala; X₃ is Ala; and X₄ is Ala;

[0534] APTSSSTKKT QLQLEHLLLX₁ LQMILNGINN YKNPKLTRML TX₂KFX₃MPKKA TELKHLQCLE EELKPLEEVL NLAQSKNFHL RPRDLISNIN VIVLELKGSE TTFMCEYADE TATIVEFLNR WITFCX₄SIIS TLT (SEQ ID NO: 262), where X₁ is any amino acid other than Asp; where X₂ is any amino acid other than Phe; where X₃ is any amino acid other than Tyr; and where X₄ is any amino acid other than Gln. In some cases, X₁ is Ala. In some cases, X₂ is Ala. In some cases, X₃ is Ala. In some cases, X₄ is Ala. In some cases, X₁ is Ala; X₂ is Ala; X₃ is Ala; and X₄ is Ala;

[0535] APTSSSTKKT QLQLEX₁LLLX₂ LQMILNGINN YKNPKLTRML TX₃KFX₄MPKKA TELKHLQCLE EELKPLEEVL NLAQSKNFHL RPRDLISNIN VIVLELKGSE TTFMCEYADE TATIVEFLNR WITFCX₅SIIS TLT (SEQ ID NO: 263), where X₁ is any amino acid other than His; where X₂ is any amino acid other than Asp; where X₃ is any amino acid other than Phe; where X₄ is any amino acid other than Tyr; and where X₅ is any amino acid other than Gln. In some cases, X₁ is Ala. In some cases, X₂ is Ala. In some cases, X₃ is Ala. In some cases, X₄ is Ala. In some cases, X₅ is Ala. In some cases, X₁ is Ala; X₂ is Ala; X₃ is Ala; X₄ is Ala; X₅ is Ala; and

[0536] APTSSSTKKT QLQLEX₁LLLD LQMILNGINN YKNPKLTRML TX₂KFYMPKKA TELKHLQCLE EELKPLEEVL NLAQSKNFHL RPRDLISNIN VIVLELKGSE TTFMCEYADE TATIVEFLNR WITFCX₃SIIS TLT (SEQ ID NO: 264), where X₁ is any amino acid other than His; where X₂ is any amino acid other than Phe; and where X₃ is any amino acid other than Gln. In some cases, X₁ is Ala. In some cases, X₂ is Ala. In some cases, X₃ is Ala. In some cases, X₁ is Ala; X₂ is Ala; and X₃ is Ala.

### TGF-β

[0537] As noted above, in some cases, the immunomodulatory polypeptide present in a TMAPP of the present disclosure is a TGF-β polypeptide Amino acid sequences of TGF-β polypeptides are known in the art. In some cases, the immunomodulatory polypeptide present in a TMAPP of the present disclosure is a TGF-β1 polypeptide immunomodulatory polypeptide present in a TMAPP of the present disclosure is a TGF-β2 polypeptide immunomodulatory polypeptide present in a TMAPP of the present disclosure is a TGF-β3 polypeptide. A suitable TGF-β polypeptide can comprise an amino acid sequence having at least 60%, at least 70%, at least 80%, at least 90%, at least 95%, at least 98%, at least 99%, or 100%, amino acid sequence identity to the mature form of a human TGF-β1 polypeptide, a human TGF-β2 polypeptide, or a human TGF-β3 polypeptide. A suitable TGF-β polypeptide can have a length of from about 100 amino acids to about 125 amino acids; for example, a suitable TGF-β polypeptide can have a length of from about 100 amino acids to about 105 amino acids, from about 105 amino acids to about 110 amino acids, from about 110 amino acids to about 115 amino acids, from about 115 amino acids to about 120 amino acids, or from about 120 amino acids to about 125 amino acids.

[0538] A suitable TGF-β1 polypeptide can comprise an amino acid sequence having at least 60%, at least 70%, at least 80%, at least 90%, at least 95%, at least 98%, at least 99%, or 100%, amino acid sequence identity to the following TGF-β1 amino acid sequence: AL DTNYCFSSTE KNCCVRQLYI DFRKDLGWKW IHEPKGYHAN FCLGPCPYIW SLDTQYSKVL ALYNQHNPGA SAAPCCVPQA LEPLPIVYYV GRKPKVEQLS NMIVRSCKCS (SEQ ID NO: 265); where the TGF-β1 polypeptide has a length of about 112 amino acids.

[0539] In some cases, a suitable TGF-β1 polypeptide comprises a C77S substitution. Thus, in some cases, a suitable TGF-β1 polypeptide comprises an amino acid sequence having at least 60%, at least 70%, at least 80%, at least 90%, at least 95%, at least 98%, at least 99%, or 100%, amino acid sequence identity to the following TGF-β1 amino acid sequence: AL DTNYCFSSTE KNCCVRQLYI DFRKDLGWKW IHEPKGYHAN FCLGPCPYIW SLDTQYSKVL ALYNQHNPGA SAAPSCVPQA LEPLPIVYYV GRKPKVEQLS NMIVRSCKCS (SEQ ID NO: 266), where amino acid 77 is Ser.

[0540] A suitable TGF-β2 polypeptide can comprise an amino acid sequence having at least 60%, at least 70%, at least 80%, at least 90%, at least 95%, at least 98%, at least 99%, or 100%, amino acid sequence identity to the following TGF-β2 amino acid sequence: ALDAAYCF RNVQDNCCLR PLYIDFKRDL GWKWIHEPKG YNANFCAGAC PYLWSSDTQH SRVLSLYNTI NPEASASPCC VSQDLEPLTI LYYIGKTPKI EQLSNMIVKS CKCS (SEQ ID NO: 267), where the TGF-β2 polypeptide has a length of about 112 amino acids.

[0541] In some cases, a suitable TGF-β2 polypeptide comprises a C77S substitution. Thus, in some cases, a suitable TGF-β2 polypeptide comprises an amino acid sequence having at least 60%, at least 70%, at least 80%, at least 90%, at least 95%, at least 98%, at least 99%, or 100%, amino acid sequence identity to the following TGF-β2 amino acid sequence: ALDAAYCF RNVQDNCCLR PLYIDFKRDL GWKWIHEPKG YNANFCAGAC PYLWSSDTQH SRVLSLYNTI NPEASASPSC VSQDLEPLTI LYYIGKTPKI EQLSNMIVKS CKCS (SEQ ID NO: 268), where amino acid 77 is Ser.

[0542] A suitable TGF-β3 polypeptide can comprise an amino acid sequence having at least 60%, at least 70%, at least 80%, at least 90%, at least 95%, at least 98%, at least 99%, or 100%, amino acid sequence identity to the following TGF-β3 amino acid sequence: [sequence omitted] (SEQ ID NO: 269), where the TGF-β3 polypeptide has a length of about 112 amino acids.

[0543] In some cases, a suitable TGF-β3 polypeptide comprises a C77S substitution. Thus, in some cases, a suitable TGF-β3 polypeptide comprises an amino acid sequence having at least 60%, at least 70%, at least 80%, at least 90%, at least 95%, at least 98%, at least 99%, or 100%, amino acid sequence identity to the following TGF-β3 amino acid sequence: ALDTNYCFRN LEENCCVRPL YIDFRQDLGW KWVHEPKGYY ANFCSGPCPY LRSADTTHST VLGLYNTLNP EASASPSCVP QDLEPLTILY YVGRTPKVEQ LSNMVVKSCK CS (SEQ ID NO: 270), where amino acid 77 is Ser.

### Dimerizer Pairs

[0544] As noted above, in some cases, an antigen-presenting polypeptide of the present disclosure (including a TMAPP of the present disclosure) comprises a dimerizer pair of polypeptides. For example, where an antigen-presenting polypeptide of the present disclosure (including a TMAPP of the present disclosure) is a multimeric polypeptide comprising at least a first and a second polypeptide, in some cases, the first polypeptide comprises a first member of a dimerization pair, and the second polypeptide comprising a second member of the dimerization pair.

[0545] Dimerization peptides are known in the art; and any known dimerization peptide is suitable for use. Dimerization peptides include polypeptides of the collectin family (e.g., ACRP30 or ACRP30-like proteins) which contain collagen domains consisting of collagen repeats Gly-Xaa-Xaa. Other dimerization peptides include coiled-coil domains and leucine-zipper domains. A collagen domain can comprise (Gly-Xaa-Xaa)ₙ (SEQ ID NO: 431), where Xaa is any amino acid, and where n is an integer from 10 to 40. In some cases, a collagen domain comprises (Gly-Xaa-Pro)ₙ (SEQ ID NO: 432), where Xaa is any amino acid and n is an integer from 10 to 40. Dimerization peptides are well known in the art; see, e.g., U.S. Patent Publication No. 2003/0138440.

[0546] In some cases, a dimerization pair includes two leucine zipper polypeptides that bind to one another. Non-limiting examples of leucine-zipper polypeptides include, e.g., a peptide of any one of the following amino acid sequences: RMKQIEDKIEEILSKIYHIENEIARIKKLIGER (SEQ ID NO: 271); LSSIEKKQEEQTSWLIWISNELTLIRNELAQS (SEQ ID NO: 272); LSSIEKKLEEITSQLIQISNELTLIRNELAQ (SEQ ID NO: 273); LSSIEKKLEEITSQLIQIRNELTLIRNELAQ (SEQ ID NO: 274); LSSIEKKLEEITSQLQQIRNELTLIRNELAQ (SEQ ID NO: 275); LSSLEKKLEELTSQLIQLRNELTLLRNELAQ (SEQ ID NO: 276); ISSLEKKIEELTSQIQQLRNEITLLRNEIAQ (SEQ ID NO: 277).

[0547] In some cases, a leucine zipper polypeptide comprises the following amino acid sequence: LEIEAAFLERENTALETRVAELRQRVQRLRNRVSQYRTRYGPLGGGK (SEQ ID NO: 278).

[0548] Additional leucine-zipper polypeptides are known in the art, any of which is suitable for use in an antigen-presenting polypeptide of the present disclosure.

[0549] A collagen oligomerization peptide can comprise the following amino acid sequence:

(SEQ ID NO: 279)
VTAFSNMDDMLQKAHLVIEGTFIYLRDSTEFFIRVRDGWKKLQLGELIPIP
ADSPPPPALSSNP.

[0550] Coiled-coil dimerization peptides are known in the art. For example, a coiled-coil dimerization peptide can be a peptide of any one of the following amino acid sequences:

(SEQ ID NO: 280)
LKSVENRLAVVENQLKTVIEELKTVKDLLSN;
(SEQ ID NO: 281)
LARIEEKLKTIKAQLSEIASTLNMIREQLAQ;
(SEQ ID NO: 282)
VSRLEEKVKTLKSQVTELASTVSLLREQVAQ;
(SEQ ID NO: 283)
IQSEKKIEDISSLIGQIQSEITLIRNEIAQ;
(SEQ ID NO: 284)
LMSLEKKLEELTQTLMQLQNELSMLKNELAQ.

[0551] In some cases, a dimerization peptide comprises at least one cysteine residue. Examples include, e.g.: VDLEGSTSNGRQCAGIRL (SEQ ID NO: 285); EDDVTTTEELAPALVPPPKGTCAGWMA (SEQ ID NO: 286); and GHDQETTTQGPGVLLPLPKGACTGQMA (SEQ ID NO: 287).

[0552] Ig CH1 domains and Ig κ chain constant regions, such as those shown in FIG. 5A and FIG. 5B can also serve as dimerization peptides.

### Additional Polypeptides

[0553] A polypeptide chain of a TMAPP of the present disclosure (including a TMAPP of the present disclosure) can include one or more polypeptides in addition to those described above. Suitable additional polypeptides include epitope tags and affinity domains. The one or more additional polypeptide can be included at the N-terminus of a polypeptide chain of a TMAPP of the present disclosure, at the C-terminus of a polypeptide chain of a TMAPP of the present disclosure, or internally within a polypeptide chain of a TMAPP of the present disclosure.

### Epitope Tag

[0554] Suitable epitope tags include, but are not limited to, hemagglutinin (HA; e.g., YPYDVPDYA (SEQ ID NO: 288); FLAG (e.g., DYKDDDDK (SEQ ID NO: 289); c-myc (e.g., EQKLISEEDL; SEQ ID NO: 290), and the like.

### Affinity Domain

[0555] Affinity domains include peptide sequences that can interact with a binding partner, e.g., such as one immobilized on a solid support, useful for identification or purification. DNA sequences encoding multiple consecutive single amino acids, such as histidine, when fused to the expressed protein, may be used for one-step purification of the recombinant protein by high affinity binding to a resin column, such as nickel sepharose. Exemplary affinity domains include His5 (HHHHH) (SEQ ID NO: 291), HisX6 (HHHHHH) (SEQ ID NO: 292), C-myc (EQKLISEEDL) (SEQ ID NO: 290), Flag (DYKDDDDK) (SEQ ID NO: 289), StrepTag (WSHPQFEK) (SEQ ID NO: 293), hemagglutinin, e.g., HA Tag (YPYDVPDYA) (SEQ ID NO: 288), glutathione-S-transferase (GST), thioredoxin, cellulose binding domain, RYIRS (SEQ ID NO: 294), Phe-His-His-Thr (SEQ ID NO: 295), chitin binding domain, S-peptide, T7 peptide, SH2 domain, C-end RNA tag, WEAAAREACCRECCARA (SEQ ID NO: 296), metal binding domains, e.g., zinc binding domains or calcium binding domains such as those from calcium-binding proteins, e.g., calmodulin, troponin C, calcineurin B, myosin light chain, recoverin, S-modulin, visinin, VILIP, neurocalcin, hippocalcin, frequenin, caltractin, calpain large-subunit, S100 proteins, parvalbumin, calbindin D9K, calbindin D28K, and calretinin, inteins, biotin, streptavidin, MyoD, Id, leucine zipper sequences, and maltose binding protein.

### Drug Conjugates

[0556] A polypeptide chain of a TMAPP of the present disclosure can comprise a small molecule drug linked (e.g., covalently attached) to the polypeptide chain. For example, where a TMAPP of the present disclosure comprises an Fc polypeptide, the Fc polypeptide can comprise a covalently linked small molecule drug. In some cases, the small molecule drug is an agent that treats an autoimmune disease, or an agent that relieves a symptom of an autoimmune disease. A polypeptide chain of a TMAPP of the present disclosure can comprise an agent linked (e.g., covalently attached) to the polypeptide chain. For example, where a TMAPP of the present disclosure comprises an Fc polypeptide, the Fc polypeptide can comprise a covalently linked agent.

[0557] A drug can be linked directly or indirectly to a polypeptide chain of a TMAPP of the present disclosure. For example, where a TMAPP of the present disclosure comprises an Fc polypeptide, a drug can be linked directly or indirectly to the Fc polypeptide. Direct linkage can involve linkage directly to an amino acid side chain. Indirect linkage can be linkage via a linker. A drug can be linked to a polypeptide chain (e.g., an Fc polypeptide) of a TMAPP of the present disclosure via a thioether bond, an amide bond, a carbamate bond, a disulfide bond, or an ether bond.

[0558] Linkers include cleavable linkers and non-cleavable linkers. In some cases, the linker is a protease-cleavable linker. Suitable linkers include, e.g., peptides (e.g., from 2 to 10 amino acids in length; e.g., 2, 3, 4, 5, 6, 7, 8, 9, or 10 amino acids in length), alkyl chains, poly(ethylene glycol), disulfide groups, thioether groups, acid labile groups, photolabile groups, peptidase labile groups, and esterase labile groups. Non-limiting example of suitable linkers are: i) N-succinimidyl-[(N-maleimidopropionamido)-tetraethyleneglycol]ester (NHS-PEG4-maleimide); ii) N-succinimidyl 4-(2-pyridyldithio)butanoate (SPDB); N-succinimidyl 4-(2-pyridyldithio)2-sulfobutanoate (sulfo-SPDB); N-succinimidyl 4-(2-pyridyldithio) pentanoate (SPP); N-succinimidyl-4-(N-maleimidomethyl)-cyclohexane-1-carboxy-(6-amidocaproate) (LC-SMCC); κ-maleimidoundecanoic acid N-succinimidyl ester (KMUA); γ-maleimide butyric acid N-succinimidyl ester (GMBS); ε-maleimidocaproic acid N-hydroxysuccinimide ester (EMCS); m-maleimide benzoyl-N-hydroxysuccinimide ester (MB S); N-(α-maleimidoacetoxy)-succinimide ester (AMAS); succinimidyl-6-(β-maleimidopropionamide)hexanoate (SMPH); N-succinimidyl 4-(p-maleimidophenyl)butyrate (SMPB); N-(p-maleimidophenyl)isocyanate (PMPI); N-succinimidyl 4(2-pyridylthio)pentanoate (SPP); N-succinimidyl(4-iodo-acetyl)aminobenzoate (SIAB); 6-maleimidocaproyl (MC); maleimidopropanoyl (MP); p-aminobenzyloxycarbonyl (PAB); N-succinimidyl 4-(maleimidomethyl)cyclohexanecarboxylate (SMCC); N-succinimidyl-4-(N-maleimidomethyl)-cyclohexane-1-carboxy-(6-amidocaproate), a “long chain” analog of SMCC (LC-SMCC); 3-maleimidopropanoic acid N-succinimidyl ester (BMPS); N-succinimidyl iodoacetate (SIA); N-succinimidyl bromoacetate (SBA); and N-succinimidyl 3-(bromoacetamido)propionate (SBAP).

[0559] A polypeptide (e.g., an Fc polypeptide) can be modified with crosslinking reagents such as succinimidyl 4-(N-maleimidomethyl)-cyclohexane-1-carboxylate (SMCC), sulfo-SMCC, maleimidobenzoyl-N-hydroxysuccinimide ester (MBS), sulfo-MBS or succinimidyl-iodoacetate, as described in the literature, to introduce 1-10 reactive groups. The modified Fc polypeptide is then reacted with a thiol-containing agent to produce a conjugate.

[0560] For example, where a TMAPP of the present disclosure comprises an Fc polypeptide, the polypeptide chain comprising the Fc polypeptide can be of the formula (A)-(L)-(C), where (A) is the polypeptide chain comprising the Fc polypeptide; where (L), if present, is a linker; and where (C) is an agent. (L), if present, links (A) to (C). In some cases, the polypeptide chain comprising the Fc polypeptide can comprise more than one agent (e.g., 2, 3, 4, or 5, or more than 5, agents).

[0561] Suitable drugs include, e.g., sulfasalazine, azathioprine, cyclophosphamide, antimalarials, D-penicillamine, cyclosporine. Suitable drugs include non-steroidal anti-inflammatory drugs; glucocorticoids; leflunomide; methotrexate; and the like.

### Exemplary T-Cell Modulatory Antigen-Presenting Polypeptides

[0562] The following are non-limiting examples of multimeric TMAPPs of the present disclosure.

[0563] 1) In some cases, a multimeric TMAPP of the present disclosure comprises: a) a first polypeptide comprising, in order from N-terminus to C-terminus: i) an immunomodulatory polypeptide; ii) a linker; iii) an HLA α1 polypeptide; iv) an HLA α2 polypeptide; and v) an Ig Fc polypeptide; and b) a second polypeptide comprising, in order from N-terminus to C-terminus: i) a peptide that presents an epitope capable of binding to a TCR (e.g., a “self” epitope”); ii) a linker; iii) an HLA β1 polypeptide; and iv) an HLA β2 polypeptide. In some cases, the immunomodulatory polypeptide is a PD-L1 polypeptide. In some cases, the PD-L1 polypeptide comprises the following amino acid sequence: FTVTVPKDLYVVEYGSNMTIECKFPVEKQLDLAALIVYWEMEDKNIIQFVHGEEDLKVQ HSSYRQRARLLKDQLSLGNAALQITDVKLQDAGVYRCMISYGGADYKRITVKVNAPYN KINQRILVVDPVTSEHELTCQAEGYPKAEVIWTSSDHQVLSGKTTTTNSKREEKLFNVTS TLRINTTTNEIFYCTFRRLDPEENHTAELVIPELPLAHPPNER (SEQ ID NO: 297) and has a length of 220 amino acids. In some cases, the HLA α1 and HLA α2 polypeptides together comprise the following amino acid sequence: IKEEHVIIQAEFYLNPDQSGEFMFDFDGDEIFHVDMAKKETVWRLEEFGRFASFEAQGAL ANIAVDKANLEIMTKRSNYTPITNVPPEVTVLTNSPVELREPNVLICFIDKFTPPVVNVTW LRNGKPVTTGVSETVFLPREDHLFRKFHYLPFLPSTEDVYDCRVEHWGLDEPLLKHWEF DAPSPLPET (SEQ ID NO: 298) and have a length of 189 amino acids. In some cases, the Ig Fc polypeptide is an IgG1 Fc polypeptide with L14A and L15A substitutions, e.g., where the Ig Fc polypeptide comprises the following amino acid sequence: DKTHTCPPCPAPEAAGGPSVFLFPPKPKDTLMISRTPEVTCVVVDVSHEDPEVKFNWYV DGVEVHNAKTKPREEQYNSTYRVVSVLTVLHQDWLNGKEYKCKVSNKALPAPIEKTIS KAKGQPREPQVYTLPPSREEMTKNQVSLTCLVKGFYPSDIAVEWESNGQPENNYKTTPP VLDSDGSFFLYSKLTVDKSRWQQGNVFSCSVMHEALHNHYTQKSLSLSPG (SEQ ID NO: 299) and has a length of 226 amino acids. In some cases, the peptide epitope is an autoantigen associated with multiple sclerosis. In some cases, the HLA β1 and β2 polypeptides together comprise the following amino acid sequence: GDTRPRFLEQVKHECHFFNGTERVRFLDRYFYHQEEYVRFDSDVGEYRAVTELGRPDA EYWNSQKDLLEQKRAAVDTYCRHNYGVGESFTVQRRVYPEVTVYPAKTQPLQHHNLL VCSVNGFYPASIEVRWFRNGQEEKTGVVSTGLIQNGDWTFQTLVMLETVPRSGEVYTC QVEHPSLTSPLTVEWRARSESAQSKM (SEQ ID NO: 300), and have a length of 199 amino acids. A suitable linker can be GGGGSGGGGSGGGGS (SEQ ID NO: 301) or GGGGSGGGGSGGGGSGGGGS (SEQ ID NO: 302).

[0564] 2) In some cases, a multimeric TMAPP of the present disclosure comprises: a) a first polypeptide comprising, in order from N-terminus to C-terminus: i) an HLA α1 polypeptide; ii) an HLA α2 polypeptide; iii) a linker; iv) an immunomodulatory polypeptide; v) a linker; and vi) an Ig Fc polypeptide; and b) a second polypeptide comprising, in order from N-terminus to C-terminus: i) a peptide that presents an epitope capable of binding to a TCR (e.g., a “self” epitope); ii) a linker; iii) an HLA β1 polypeptide; and iv) an HLA β2 polypeptide. In some cases, the immunomodulatory polypeptide is a PD-L1 polypeptide. In some cases, the PD-L1 polypeptide comprises the following amino acid sequence: FTVTVPKDLYVVEYGSNMTIECKFPVEKQLDLAALIVYWEMEDKNIIQFVHGEEDLKVQ HSSYRQRARLLKDQLSLGNAALQITDVKLQDAGVYRCMISYGGADYKRITVKVNAPYN KINQRILVVDPVTSEHELTCQAEGYPKAEVIWTSSDHQVLSGKTTTTNSKREEKLFNVTS TLRINTTTNEIFYCTFRRLDPEENHTAELVIPELPLAHPPNER (SEQ ID NO: 297) and has a length of 220 amino acids. In some cases, the HLA α1 and HLA α2 polypeptides together comprise the following amino acid sequence: IKEEHVIIQAEFYLNPDQSGEFMFDFDGDEIFHVDMAKKETVWRLEEFGRFASFEAQGAL ANIAVDKANLEIMTKRSNYTPITNVPPEVTVLTNSPVELREPNVLICFIDKFTPPVVNVTW LRNGKPVTTGVSETVFLPREDHLFRKFHYLPFLPSTEDVYDCRVEHWGLDEPLLKHWEF DAPSPLPET (SEQ ID NO: 298) and have a length of 189 amino acids. In some cases, the Ig Fc polypeptide is an IgG1 Fc polypeptide with L14A and L15A substitutions, e.g., where the Ig Fc polypeptide comprises the following amino acid sequence: DKTHTCPPCPAPEAAGGPSVFLFPPKPKDTLMISRTPEVTCVVVDVSHEDPEVKFNWYV DGVEVHNAKTKPREEQYNSTYRVVSVLTVLHQDWLNGKEYKCKVSNKALPAPIEKTIS KAKGQPREPQVYTLPPSREEMTKNQVSLTCLVKGFYPSDIAVEWESNGQPENNYKTTPP VLDSDGSFFLYSKLTVDKSRWQQGNVFSCSVMHEALHNHYTQKSLSLSPG (SEQ ID NO: 299) and has a length of 226 amino acids. In some cases, the peptide epitope is a self peptide. For example, in some cases, the peptide epitope is an autoantigen associated with rheumatoid arthritis. In some cases, the HLA β1 and β2 polypeptides together comprise the following amino acid sequence: GDTRPRFLEQVKHECHFFNGTERVRFLDRYFYHQEEYVRFDSDVGEYRAVTELGRPDA EYWNSQKDLLEQKRAAVDTYCRHNYGVGESFTVQRRVYPEVTVYPAKTQPLQHHNLL VCSVNGFYPASIEVRWFRNGQEEKTGVVSTGLIQNGDWTFQTLVMLETVPRSGEVYTC QVEHPSLTSPLTVEWRARSESAQSKM (SEQ ID NO: 300), and have a length of 199 amino acids. A suitable linker can be GGGGSGGGGSGGGGS (SEQ ID NO: 301) or GGGGSGGGGSGGGGSGGGGS (SEQ ID NO: 302).

[0565] 3) In some cases, a multimeric TMAPP of the present disclosure comprises: a) a first polypeptide comprising, in order from N-terminus to C-terminus: i) an HLA α1 polypeptide; ii) an HLA α2 polypeptide; iii) a linker; iv) an Ig Fc polypeptide; and v) an immunomodulatory polypeptide; and b) a second polypeptide comprising, in order from N-terminus to C-terminus: i) a peptide that presents an epitope capable of binding to a TCR (e.g., a “self” epitope); ii) a linker; iii) an HLA β1 polypeptide; and iv) an HLA β2 polypeptide. In some cases, the immunomodulatory polypeptide is a PD-L1 polypeptide. In some cases, the PD-L1 polypeptide comprises the following amino acid sequence: FTVTVPKDLYVVEYGSNMTIECKFPVEKQLDLAALIVYWEMEDKNIIQFVHGEEDLKVQ HSSYRQRARLLKDQLSLGNAALQITDVKLQDAGVYRCMISYGGADYKRITVKVNAPYN KINQRILVVDPVTSEHELTCQAEGYPKAEVIWTSSDHQVLSGKTTTTNSKREEKLFNVTS TLRINTTTNEIFYCTFRRLDPEENHTAELVIPELPLAHPPNER (SEQ ID NO: 297) and has a length of 220 amino acids. In some cases, the HLA α1 and HLA α2 polypeptides together comprise the following amino acid sequence: IKEEHVIIQAEFYLNPDQSGEFMFDFDGDEIFHVDMAKKETVWRLEEFGRFASFEAQGAL ANIAVDKANLEIMTKRSNYTPITNVPPEVTVLTNSPVELREPNVLICFIDKFTPPVVNVTW LRNGKPVTTGVSETVFLPREDHLFRKFHYLPFLPSTEDVYDCRVEHWGLDEPLLKHWEF DAPSPLPET (SEQ ID NO: 298) and have a length of 189 amino acids. In some cases, the Ig Fc polypeptide is an IgG1 Fc polypeptide with L14A and L15A substitutions, e.g., where the Ig Fc polypeptide comprises the following amino acid sequence: DKTHTCPPCPAPEAAGGPSVFLFPPKPKDTLMISRTPEVTCVVVDVSHEDPEVKFNWYV DGVEVHNAKTKPREEQYNSTYRVVSVLTVLHQDWLNGKEYKCKVSNKALPAPIEKTIS KAKGQPREPQVYTLPPSREEMTKNQVSLTCLVKGFYPSDIAVEWESNGQPENNYKTTPP VLDSDGSFFLYSKLTVDKSRWQQGNVFSCSVMHEALHNHYTQKSLSLSPG (SEQ ID NO: 299) and has a length of 226 amino acids. In some cases, the peptide epitope is a self peptide. For example, in some cases, the peptide epitope associated with SLE. In some cases, the HLA β1 and β2 polypeptides together comprise the following amino acid sequence: GDTRPRFLEQVKHECHFFNGTERVRFLDRYFYHQEEYVRFDSDVGEYRAVTELGRPDA EYWNSQKDLLEQKRAAVDTYCRHNYGVGESFTVQRRVYPEVTVYPAKTQPLQHHNLL VCSVNGFYPASIEVRWFRNGQEEKTGVVSTGLIQNGDWTFQTLVMLETVPRSGEVYTC QVEHPSLTSPLTVEWRARSESAQSKM (SEQ ID NO: 300), and have a length of 199 amino acids. A suitable linker can be GGGGSGGGGSGGGGS (SEQ ID NO: 301) or GGGGSGGGGSGGGGSGGGGS (SEQ ID NO: 302).

[0566] 4) In some cases, a multimeric TMAPP of the present disclosure comprises: a) a first polypeptide comprising, in order from N-terminus to C-terminus: i) an HLA α1 polypeptide; ii) an HLA α2 polypeptide; iii) a linker; and iv) an Ig Fc polypeptide; and b) a second polypeptide comprising, in order from N-terminus to C-terminus: i) an immunomodulatory polypeptide; ii) a linker; iii) a peptide that presents an epitope capable of binding to a TCR (e.g., a “self” epitope); iv) a linker; v) an HLA β1 polypeptide; and vi) an HLA β2 polypeptide. In some cases, the immunomodulatory polypeptide is a PD-L1 polypeptide. In some cases, the PD-L1 polypeptide comprises the following amino acid sequence: FTVTVPKDLYVVEYGSNMTIECKFPVEKQLDLAALIVYWEMEDKNIIQFVHGEEDLKVQ HSSYRQRARLLKDQLSLGNAALQITDVKLQDAGVYRCMISYGGADYKRITVKVNAPYN KINQRILVVDPVTSEHELTCQAEGYPKAEVIWTSSDHQVLSGKTTTTNSKREEKLFNVTS TLRINTTTNEIFYCTFRRLDPEENHTAELVIPELPLAHPPNER (SEQ ID NO: 297) and has a length of 220 amino acids. In some cases, the HLA α1 and HLA α2 polypeptides together comprise the following amino acid sequence: IKEEHVIIQAEFYLNPDQSGEFMFDFDGDEIFHVDMAKKETVWRLEEFGRFASFEAQGAL ANIAVDKANLEIMTKRSNYTPITNVPPEVTVLTNSPVELREPNVLICFIDKFTPPVVNVTW LRNGKPVTTGVSETVFLPREDHLFRKFHYLPFLPSTEDVYDCRVEHWGLDEPLLKHWEF DAPSPLPET (SEQ ID NO: 298) and have a length of 189 amino acids. In some cases, the Ig Fc polypeptide is an IgG1 Fc polypeptide with L14A and L15A substitutions, e.g., where the Ig Fc polypeptide comprises the following amino acid sequence: DKTHTCPPCPAPEAAGGPSVFLFPPKPKDTLMISRTPEVTCVVVDVSHEDPEVKFNWYV DGVEVHNAKTKPREEQYNSTYRVVSVLTVLHQDWLNGKEYKCKVSNKALPAPIEKTIS KAKGQPREPQVYTLPPSREEMTKNQVSLTCLVKGFYPSDIAVEWESNGQPENNYKTTPP VLDSDGSFFLYSKLTVDKSRWQQGNVFSCSVMHEALHNHYTQKSLSLSPG (SEQ ID NO: 299) and has a length of 226 amino acids. In some cases, the peptide epitope is a self peptide. For example, in some cases, the peptide epitope is associated with Sjögren's syndrome. In some cases, the HLA β1 and β2 polypeptides together comprise the following amino acid sequence: GDTRPRFLEQVKHECHFFNGTERVRFLDRYFYHQEEYVRFDSDVGEYRAVTELGRPDA EYWNSQKDLLEQKRAAVDTYCRHNYGVGESFTVQRRVYPEVTVYPAKTQPLQHHNLL VCSVNGFYPASIEVRWFRNGQEEKTGVVSTGLIQNGDWTFQTLVMLETVPRSGEVYTC QVEHPSLTSPLTVEWRARSESAQSKM (SEQ ID NO: 300), and have a length of 199 amino acids. A suitable linker can be GGGGSGGGGSGGGGS (SEQ ID NO: 301) or GGGGSGGGGSGGGGSGGGGS (SEQ ID NO: 302).

[0567] 5) In some cases, a multimeric TMAPP of the present disclosure comprises: a) a first polypeptide comprising, in order from N-terminus to C-terminus: i) an HLA α1 polypeptide; ii) an HLA α2 polypeptide; iii) a linker; and iv) an Ig Fc polypeptide; and b) a second polypeptide comprising, in order from N-terminus to C-terminus: i) a peptide that presents an epitope capable of binding to a TCR (e.g., a “self” epitope); ii) a linker; iii) an HLA β1 polypeptide; iv) an HLA β2 polypeptide; and v) an immunomodulatory polypeptide. In some cases, the immunomodulatory polypeptide is a PD-L1 polypeptide. In some cases, the PD-L1 polypeptide comprises the following amino acid sequence: FTVTVPKDLYVVEYGSNMTIECKFPVEKQLDLAALIVYWEMEDKNIIQFVHGEEDLKVQ HSSYRQRARLLKDQLSLGNAALQITDVKLQDAGVYRCMISYGGADYKRITVKVNAPYN KINQRILVVDPVTSEHELTCQAEGYPKAEVIWTSSDHQVLSGKTTTTNSKREEKLFNVTS TLRINTTTNEIFYCTFRRLDPEENHTAELVIPELPLAHPPNER (SEQ ID NO: 297) and has a length of 220 amino acids. In some cases, the HLA α1 and HLA α2 polypeptides together comprise the following amino acid sequence: IKEEHVIIQAEFYLNPDQSGEFMFDFDGDEIFHVDMAKKETVWRLEEFGRFASFEAQGAL ANIAVDKANLEIMTKRSNYTPITNVPPEVTVLTNSPVELREPNVLICFIDKFTPPVVNVTW LRNGKPVTTGVSETVFLPREDHLFRKFHYLPFLPSTEDVYDCRVEHWGLDEPLLKHWEF DAPSPLPET (SEQ ID NO: 298) and have a length of 189 amino acids. In some cases, the Ig Fc polypeptide is an IgG1 Fc polypeptide with L14A and L15A substitutions, e.g., where the Ig Fc polypeptide comprises the following amino acid sequence: DKTHTCPPCPAPEAAGGPSVFLFPPKPKDTLMISRTPEVTCVVVDVSHEDPEVKFNWYV DGVEVHNAKTKPREEQYNSTYRVVSVLTVLHQDWLNGKEYKCKVSNKALPAPIEKTIS KAKGQPREPQVYTLPPSREEMTKNQVSLTCLVKGFYPSDIAVEWESNGQPENNYKTTPP VLDSDGSFFLYSKLTVDKSRWQQGNVFSCSVMHEALHNHYTQKSLSLSPG (SEQ ID NO: 299) and has a length of 226 amino acids. In some cases, the peptide epitope is a self peptide. For example, in some cases, the peptide epitope is associated with Grave's disease. In some cases, the HLA β1 and β2 polypeptides together comprise the following amino acid sequence: GDTRPRFLEQVKHECHFFNGTERVRFLDRYFYHQEEYVRFDSDVGEYRAVTELGRPDA EYWNSQKDLLEQKRAAVDTYCRHNYGVGESFTVQRRVYPEVTVYPAKTQPLQHHNLL VCSVNGFYPASIEVRWFRNGQEEKTGVVSTGLIQNGDWTFQTLVMLETVPRSGEVYTC QVEHPSLTSPLTVEWRARSESAQSKM (SEQ ID NO: 300), and have a length of 199 amino acids. A suitable linker can be GGGGSGGGGSGGGGS (SEQ ID NO: 301) or GGGGSGGGGSGGGGSGGGGS (SEQ ID NO: 302).

### Additional Exemplary Multimeric TMAPPs

[0568] The following are non-limiting examples of multimeric TMAPPs of the present disclosure employing the following pairs of polypeptides: 1) the 1452 polypeptide depicted in FIG. 26A and the 1661 polypeptide depicted in FIG. 34A; 2) the 1659 polypeptide depicted in FIG. 33A and the 1664 polypeptide depicted in FIG. 35A; 3) the 1637 polypeptide depicted in FIG. and the 1408 polypeptide depicted in FIG. 25A; and the “DRA-DRB-epitope construct” polypeptide depicted in FIG. 31A and the 1640 polypeptide depicted in FIG. 32A. A TMAPP to be administered to an individual in need thereof will generally not include a leader sequence or a histidine tag as depicted in the aforementioned figures.

[0569] 1) 1452+1661. In some cases, a multimeric TMAPP of the present disclosure comprises: a) a first polypeptide comprising, in order from N-terminus to C-terminus: i) an epitope; ii) a linker; iii) an HLA β1 polypeptide; iv) an HLA α1 polypeptide; v) an HLA α2 polypeptide; vi) a dimerizer polypeptide; and vii) an Ig Fc polypeptide; and b) a second polypeptide comprising, in order from N-terminus to C-terminus: i) a first immunomodulatory polypeptide (e.g., a variant immunomodulatory polypeptide with reduced affinity for its cognate co-immunomodulatory polypeptide); ii) a second immunomodulatory polypeptide (e.g., a variant immunomodulatory polypeptide with reduced affinity for its cognate co-immunomodulatory polypeptide); iii) an HLA β2 polypeptide; and iv) a dimerizer polypeptide. As one non-limiting example, a multimeric TMAPP of the present disclosure can comprise: a) a first polypeptide comprising, in order from N-terminus to C-terminus: i) an epitope; ii) a linker; iii) an HLA DRB1 β1 polypeptide; iv) an HLA DRA α1 polypeptide; v) an HLA DRA α2 polypeptide; vi) a leucine zipper dimerizer polypeptide; and vii) an IgG1 Fc polypeptide; and b) a second polypeptide comprising, in order from N-terminus to C-terminus: i) a first immunomodulatory polypeptide (e.g., a variant IL-2 polypeptide comprising H16A and F42A substitutions); ii) a second immunomodulatory polypeptide (e.g., a variant IL-2 polypeptide comprising H16A and F42A substitutions); iii) an HLA DRB β2 polypeptide; and iv) a leucine zipper dimerizer polypeptide. In some cases, the epitope is a hemagglutinin epitope, e.g., PKYVKQNTLKLAT (SEQ ID NO: 303). In some cases, the variant IL-2 polypeptide comprises the following amino acid sequence: APTSSSTKKTQLQLEALLLDLQMILNGINNYKNPKLTRMLTAKFYMPKKATELKHLQCL EEELKPLEEVLNLAQSKNFHLRPRDLISNINVIVLELKGSETTFMCEYADETATIVEFLNR WITFCQSIISTLT (SEQ ID NO: 304), where the H16A and F42A substitutions are underlined. In some cases, the HLA-DRB1 β1 polypeptide comprises the following amino acid sequence: DTRPRFLWQHKFECHFFNGTERVRLLERCIYNQEESVRFDSDVGEYRAVTELGRPDAEY WNSQKDLLEQRRAAVDTYCRHNYGVGESFTVQR (SEQ ID NO: 305). In some cases, the HLA DRA α1 polypeptide comprises the following amino acid sequence IKEEHVIIQAEFYLNPDQSGEFMFDFDGDEIFHVDMAKKETVWRLEEFGRFASFEAQGAL ANIAVDKANLEIMTKRSNYTPITN (SEQ ID NO: 306). In some cases, the HLA DRA α2 polypeptide comprises the following amino acid sequence VPPEVTVLTNSPVELREPNVLICFIDKFTPPVVNVTWLRNGKPVTTGVSETVFLPREDHL FRKFHYLPFLPSTEDVYDCRVEHWGLDEPLLKHWEFDAPSPLPET (SEQ ID NO: 307). In some cases, the leucine zipper dimerizer polypeptide comprises the following amino acid sequence: LEIRAAFLRQRNTALRTEVAELEQEVQRLENEVSQYETRYGPLGGGK (SEQ ID NO: 308). In some cases, the IgG1 Fc polypeptide comprises the following amino acid sequence: DKTHTCPPCPAPELLGGPSVFLFPPKPKDTLMISRTPEVTCVVVDVSHEDPEVKFNWYV DGVEVHNAKTKPREEQYASTYRVVSVLTVLHQDWLNGKEYKCKVSNKALPAPIEKTIS KAKGQPREPQVYTLPPSREEMTKNQVSLTCLVKGFYPSDIAVEWESNGQPENNYKTTPP VLDSDGSFFLYSKLTVDKSRWQQGNVFSCSVMHEALHNHYTQKSLSLSPGK (SEQ ID NO: 309). In some cases, the first polypeptide comprises the 1452 amino acid sequence depicted in FIG. 26A, without the leader sequence and without the C-terminal linker and histidine tag. For example, in some cases, the first polypeptide comprises amino acids 21 to 628 of the 1452 amino acid sequence depicted in FIG. 26A. In some cases, the second polypeptide comprises the 1661 amino acid sequence depicted in FIG. 34A, without the leader sequence. For example, in some cases, the second polypeptide comprises amino acids 21 to 491 of the amino acid sequence depicted in FIG. 34A. In some cases, the epitope of the first polypeptide is not PKYVKQNTLKLAT (SEQ ID NO: 303), but instead is substituted with a different epitope.

[0570] 2) 1659+1664. In some cases, a multimeric TMAPP of the present disclosure comprises: a) a first polypeptide comprising, in order from N-terminus to C-terminus: i) an epitope; ii) an HLA β1 polypeptide; iii) an HLA α1 polypeptide; iv) an HLA α2 polypeptide; and v) an Ig Fc polypeptide; and b) a second polypeptide comprising, in order from N-terminus to C-terminus: i) a first immunomodulatory polypeptide (e.g., a variant immunomodulatory polypeptide with reduced affinity for its cognate co-immunomodulatory polypeptide); ii) a second immunomodulatory polypeptide (e.g., a variant immunomodulatory polypeptide with reduced affinity for its cognate co-immunomodulatory polypeptide); and iii) an HLA β2 polypeptide. As one non-limiting example, a multimeric TMAPP of the present disclosure can comprise: a) a first polypeptide comprising, in order from N-terminus to C-terminus: i) an epitope; ii) an HLA DRB1 β1 polypeptide; iii) an HLA DRA α1 polypeptide; iv) an HLA DRA α2 polypeptide; and v) an IgG1 Fc polypeptide; and b) a second polypeptide comprising, in order from N-terminus to C-terminus: i) a first immunomodulatory polypeptide (e.g., a variant IL-2 polypeptide comprising H16A and F42A substitutions); ii) a second immunomodulatory polypeptide (e.g., a variant IL-2 polypeptide comprising H16A and F42A substitutions); and iii) an HLA DRB1 β2 polypeptide. In some cases, the epitope is a hemagglutinin epitope, e.g., PKYVKQNTLKLAT (SEQ ID NO: 303). In some cases, the HLA DRB1 β1 polypeptide comprises the following amino acid sequence: DTRPRFLWQHKFECHFFNGTERVRLLERCIYNQEESVRFDSDVGEYRAVTELGRPDAEY WNSQKDLLEQRRAAVDTYCRHNYGVGESFTVQR (SEQ ID NO: 305). In some cases, the DRA α1 polypeptide comprises the following amino acid sequence: IKEEHVIIQAEFYLNPDQSGEFMFDFDGDEIFHVDMAKKETVWRLEEFGRFASFEAQGAL ANIAVDKANLEIMTKRSNYTPITN (SEQ ID NO: 306). In some cases, the DRA α2 polypeptide comprises the following amino acid sequence: VPPEVTVLTNSPVELREPNVLICFIDKFTPPVVNVTWLRNGKPVTTGVSETVFLPREDHL FRKFHYLPFLPSTEDVYDCRVEHWGLDEPLLKHWEFDA (SEQ ID NO: 320). In some cases, the IgG1 Fc polypeptide comprises the following amino acid sequence: DKTHTCPPCPAPELLGGPSVFLFPPKPKDTLMISRTPEVTCVVVDVSHEDPEVKFNWYV DGVEVHNAKTKPREEQYASTYRVVSVLTVLHQDWLNGKEYKCKVSNKALPAPIEKTIS KAKGQPREPQVYTLPPSREEMTKNQVSLTCLVKGFYPSDIAVEWESNGQPENNYKTTPP VLDSDGSFFLYSKLTVDKSRWQQGNVFSCSVMHEALHNHYTQKSLSLSPGK (SEQ ID NO: 309). In some cases, the variant IL-2 polypeptide comprises the following amino acid sequence: APTSSSTKKTQLQLEALLLDLQMILNGINNYKNPKLTRMLTAKFYMPKKATELKHLQCL EEELKPLEEVLNLAQSKNFHLRPRDLISNINVIVLELKGSETTFMCEYADETATIVEFLNR WITFCQSIISTLT (SEQ ID NO: 304), where the H16A and F42A substitutions are underlined. In some cases, the HLA DRB1 β2 polypeptide comprises the following amino acid sequence: PKVTVYPSKTQPLQHHNLLVCSVSGFYPGSIEVRWFRNGQEEKAGVVSTGLIQNGDWTF QTLVMLETVPRSGEVYTCQVEHPSVTSPLTVEWRARSESAQSKM (SEQ ID NO: 310). In some cases, the first polypeptide comprises the 1659 amino acid sequence depicted in FIG. 33A, without the leader peptide and without the C-terminal linker and histidine tag. For example, in some cases, the first polypeptide comprises amino acids 21 to 591 of the 1659 amino acid sequence depicted in FIG. 33A. In some cases, the epitope is not PKYVKQNTLKLAT (SEQ ID NO: 303), but instead is substituted with a different epitope. In some cases, the second polypeptide comprises the 1664 amino acid sequence depicted in FIG. 35A, without the leader sequence. For example, in some cases, the second polypeptide comprises amino acids 21 to 429 of the 1664 amino acid sequence depicted in FIG. 35A.

[0571] 3) 1637-1408. In some cases, a multimeric TMAPP of the present disclosure comprises: a) a first polypeptide comprising, in order from N-terminus to C-terminus: i) an epitope; ii) an HLA β1 polypeptide; iii) an HLA α1 polypeptide; iv) an HLA α2 polypeptide; v) a dimerizer polypeptide; and vi) an Ig Fc polypeptide; and b) a second polypeptide comprising, in order from N-terminus to C-terminus: i) a first immunomodulatory polypeptide (e.g., a variant immunomodulatory polypeptide with reduced affinity for its cognate co-immunomodulatory polypeptide); ii) a second immunomodulatory polypeptide (e.g., a variant immunomodulatory polypeptide with reduced affinity for its cognate co-immunomodulatory polypeptide); iii) an HLA β2 polypeptide; and iv) a dimerizer polypeptide. As one non-limiting example, a multimeric TMAPP of the present disclosure can comprise: a) a first polypeptide comprising, in order from N-terminus to C-terminus: i) an epitope; ii) an HLA DRB1 β1 polypeptide; iii) an HLA DRA α1 polypeptide; iv) an HLA DRA α2 polypeptide; v) a leucine zipper dimerizer polypeptide; and vi) an IgG1 Fc polypeptide; and b) a second polypeptide comprising, in order from N-terminus to C-terminus: i) a first immunomodulatory polypeptide (e.g., a variant IL-2 polypeptide comprising H16A and F42A substitutions); ii) a second immunomodulatory polypeptide (e.g., a variant IL-2 polypeptide comprising H16A and F42A substitutions); iii) an HLA DRB1β2 polypeptide; and iv) a leucine zipper dimerizer polypeptide. In some cases, the epitope is a cytomegalovirus (CMV) pp65 epitope (LPLKMLNIPSINVH; SEQ ID NO: 312). In some cases, the HLA DRB β1 polypeptide comprises the following amino acid sequence: DTRPRFLWQHKFECHFFNGTERVRLLERCIYNQEESVRFDSDVGEYRAVTELGRPAAEY WNSQKDLLEQRRAAVDTYCRHNYGVGESFTVQR (SEQ ID NO: 433). In some cases, the HLA DRA α1 polypeptide comprises the following amino acid sequence: IKEEHVIIQAEFYLNPDQSGEFMFDFDGDEIFHVDMAKKETVWRLEEFGRFASFEAQGAL ANIAVDKANLEIMTKRSNYTPITN (SEQ ID NO: 306). In some cases, the HLA DRA α2 polypeptide comprises the following amino acid sequence: VPPEVTVLTNSPVELREPNVLICFIDKFTPPVVNVTWLRNGKPVTTGVSETVFLPREDHL FRKFHYLPFLPSTEDVYDCRVEHWGLDEPLLKHWEFDAPSPLPET (SEQ ID NO: 307). In some cases, the leucine zipper polypeptide comprises the following amino acid sequence: LEIRAAFLRQRNTALRTEVAELEQEVQRLENEVSQYETRYGPLGGGK (SEQ ID NO: 308).

[0572] In some cases, the IgG1 Fc polypeptide comprises the following amino acid sequence: DKTHTCPPCPAPELLGGPSVFLFPPKPKDTLMISRTPEVTCVVVDVSHEDPEVKFNWYV DGVEVHNAKTKPREEQYASTYRVVSVLTVLHQDWLNGKEYKCKVSNKALPAPIEKTIS KAKGQPREPQVYTLPPSREEMTKNQVSLTCLVKGFYPSDIAVEWESNGQPENNYKTTPP VLDSDGSFFLYSKLTVDKSRWQQGNVFSCSVMHEALHNHYTQKSLSLSPGK (SEQ ID NO: 309). In some cases, the variant IL-2 polypeptide comprises the following amino acid sequence: APTSSSTKKTQLQLEALLLDLQMILNGINNYKNPKLTRMLTAKFYMPKKATELKHLQCL EEELKPLEEVLNLAQSKNFHLRPRDLISNINVIVLELKGSETTFMCEYADETATIVEFLNR WITFCQSIISTLT (SEQ ID NO: 304), where the H16A and F42A substitutions are underlined. In some cases, the HLA DRB1132 polypeptide comprises the following amino acid sequence: VEPKVTVYPSKTQPLQHHNLLVCSVSGFYPGSIEVRWFRNGQEEKAGVVSTGLIQNGD WTFQTLVMLETVPRSGEVYTCQVEHPSVTSPLTVEWRARSESAQSKM (SEQ ID NO: 311). In some cases, the leucine zipper polypeptide comprises the following amino acid sequence: LEIEAAFLERENTALETRVAELRQRVQRLRNRVSQYRTRYGPLGGGK (SEQ ID NO: 278). In some cases, the first polypeptide comprises the 1637 amino acid sequence depicted in FIG. 30A, without the leader sequence and without the C-terminal linker and histidine tag. For example, in some cases, the first polypeptide comprises amino acids 21-629 of the 1637 amino acid sequence depicted in FIG. 30A. In some cases, the first polypeptide does not include the epitope LPLKMLNIPSINVH (SEQ ID NO: 312); instead, the epitope is substituted with a different epitope. In some cases, the second polypeptide comprises the amino acid sequence depicted in FIG. 25A, but without the leader peptide. Thus, for example, in some cases, the second polypeptide comprises amino acids 21-493 of the amino acid sequence depicted in FIG. 25A.

[0573] 4) “DRA-DRB-epitope”+1640. In some cases, a TMAPP of the present disclosure comprises: a) a first polypeptide comprising, in order from N-terminus to C-terminus: i) a peptide epitope; ii) a HLA β1 polypeptide; iii) an HLA α1 polypeptide; iv) an HLA α2 polypeptide; v) a dimerizer polypeptide; and vi) an Ig Fc polypeptide; and b) a second polypeptide comprising, in order from N-terminus to C-terminus: i) a first immunomodulatory polypeptide (e.g., a variant immunomodulatory polypeptide with reduced affinity for its cognate co-immunomodulatory polypeptide); ii) a second, independently selected, immunomodulatory polypeptide (e.g., a variant immunomodulatory polypeptide with reduced affinity for its cognate co-immunomodulatory polypeptide); iii) an HLA β2 polypeptide; and iv) a dimerizer polypeptide. As one non-limiting example, a TMAPP of the present disclosure can comprise: a) a first polypeptide comprising, in order from N-terminus to C-terminus: i) a peptide epitope; ii) an HLA DRB1-4 β1 polypeptide; iii) an HLA DRA α1 polypeptide; iv) an HLA DRA α2 polypeptide; v) a leucine zipper dimerizer polypeptide; and vi) an IgG1 Fc polypeptide; and b) a second polypeptide comprising, in order from N-terminus to C-terminus: i) a first immunomodulatory polypeptide (e.g., a variant IL-2 polypeptide comprising H16A and F42A substitutions); ii) a second, independently selected, immunomodulatory polypeptide (e.g., a variant IL-2 polypeptide comprising H16A and F42A substitutions); iii) an HLA DRB1-4 β2 polypeptide; and iv) a leucine zipper dimerizer polypeptide. In some cases, the epitope is a hemagglutinin epitope, e.g., PKYVKQNTLKLAT (SEQ ID NO: 303). In some cases, the epitope is not a hemagglutinin peptide; instead, the epitope is substituted with a different epitope. In some cases, the HLA DRB1-4 β1 polypeptide comprises the following amino acid sequence: DTRPRFLEQVKHECHFFNGTERVRFLDRYFYHQEEYVRFDSDVGEYRAVTELGRPDAE YWNSQKDLLEQKRAAVDTYCRHNYGVGESFTVQR (SEQ ID NO: 434). In some cases, the HLA DRA α1 polypeptide comprises the following amino acid sequence: IKEEHVIIQAEFYLNPDQSGEFMFDFDGDEIFHVDMAKKETVWRLEEFGRFASFEAQGAL ANIAVDKANLEIMTKRSNYTPITN (SEQ ID NO: 306). In some cases, the HLA DRA α2 polypeptide comprises the following amino acid sequence: VPPEVTVLTNSPVELREPNVLICFIDKFTPPVVNVTWLRNGKPVTTGVSETVFLPREDHL FRKFHYLPFLPSTEDVYDCRVEHWGLDEPLLKHWEFDAPSPLPET (SEQ ID NO: 307). In some cases, the leucine zipper polypeptide comprises the following amino acid sequence: LEIRAAFLRQRNTALRTEVAELEQEVQRLENEVSQYETRYGPLGGGK (SEQ ID NO: 308). In some cases, the IgG1 Fc polypeptide comprises the following amino acid sequence: DKTHTCPPCPAPELLGGPSVFLFPPKPKDTLMISRTPEVTCVVVDVSHEDPEVKFNWYV DGVEVHNAKTKPREEQYASTYRVVSVLTVLHQDWLNGKEYKCKVSNKALPAPIEKTIS KAKGQPREPQVYTLPPSREEMTKNQVSLTCLVKGFYPSDIAVEWESNGQPENNYKTTPP VLDSDGSFFLYSKLTVDKSRWQQGNVFSCSVMHEALHNHYTQKSLSLSPGK (SEQ ID NO: 309). In some cases, the variant IL-2 polypeptide comprises the following amino acid sequence: APTSSSTKKTQLQLEALLLDLQMILNGINNYKNPKLTRMLTAKFYMPKKATELKHLQCL EEELKPLEEVLNLAQSKNFHLRPRDLISNINVIVLELKGSETTFMCEYADETATIVEFLNR WITFCQSIISTLT (SEQ ID NO: 304), where the H16A and F42A substitutions are underlined. In some cases, the HLA DRB1-4 β2 polypeptide comprises the following amino acid sequence: VYPEVTVYPAKTQPLQHHNLLVCSVNGFYPASIEVRWFRNGQEEKTGVVSTGLIQNGD WTFQTLVMLETVPRSGEVYTCQVEHPSLTSPLTVEWRARSESAQSKM (SEQ ID NO: 313). In some cases, the leucine zipper polypeptide comprises the following amino acid sequence: LEIEAAFLERENTALETRVAELRQRVQRLRNRVSQYRTRYGPLGGGK (SEQ ID NO: 278). The amino acid sequences of the first polypeptide may be organized in a fashion similar to amino acids 21-629 of the DRA-DRB-epitope construct depicted in FIG. 31A e.g., without the leader sequence and without the C-terminal linker and histidine tag). The amino acid sequence of the second polypeptide may be organized in a fashion similar to amino acids 21-493 of protein/polypeptide construct 1640 depicted in FIG. 32A (without the leader sequence).

### Single-Chain TMAPPs

[0574] The following are non-limiting examples of single-chain TMAPPs of the present disclosure. See, e.g., FIG. 28A (1599 polypeptide); and FIG. 29A (1601 polypeptide). A TMAPP to be administered to an individual in need thereof will generally not include a leader sequence or a histidine tag as depicted in the aforementioned figures.

[0575] 1) 1599. In some cases, a single-chain TMAPP of the present disclosure comprises, in order from N-terminus to C-terminus: i) an epitope; ii) an HLA β1 polypeptide; iii) an HLA α1 polypeptide; iv) an HLA α2 polypeptide; v) an HLA β2 polypeptide; vi) an immunomodulatory polypeptide (e.g., a variant immunomodulatory polypeptide with reduced affinity for its cognate co-immunomodulatory polypeptide); and vii) an Ig Fc polypeptide. As one non-limiting example, a single-chain TMAPP of the present disclosure can comprise, in order from N-terminus to C-terminus: i) an epitope; ii) an HLA DRB1 β1 polypeptide; iii) an HLA DRA α1 polypeptide; iv) an HLA DRA α2 polypeptide; v) an HLA DRB β2 polypeptide; vi) an immunomodulatory polypeptide (e.g., a variant IL-2 polypeptide comprising H16A and F42A substitutions); and vii) an IgG1 Fc polypeptide. In some cases, the epitope is a hemagglutinin epitope (e.g., PKYVKQNTLKLAT; SEQ ID NO: 303). In some cases, the HLA DRB1 β1 polypeptide comprises the following amino acid sequence: DTRPRFLWQHKFECHFFNGTERVRLLERCIYNQEESVRFDSDVGEYRAVTELGRPDAEY WNSQKDLLEQRRAAVDTYCRHNYGVGESFTVQRRVEP (SEQ ID NO: 315). In some cases, the HLA DRA α1 polypeptide comprises the following amino acid sequence: IKEEHVIIQAEFYLNPDQSGEFMFDFDGDEIFHVDMAKKETVWRLEEFGRFASFEAQGAL ANIAVDKANLEIMTKRSNYTPITN (SEQ ID NO: 306). In some cases, the HLA DRB β2 polypeptide comprises the following amino acid sequence: KVTVYPSKTQPLQHHNLLVCSVSGFYPGSIEVRWFRNGQEEKAGVVSTGLIQNGDWTF QTLVMLETVPRSGEVYTCQVEHPSVTSPLTVEWRARS (SEQ ID NO: 319). In some cases, the variant IL-2 polypeptide comprises the following amino acid sequence: APTSSSTKKTQLQLEALLLDLQMILNGINNYKNPKLTRMLTAKFYMPKKATELKHLQCL EEELKPLEEVLNLAQSKNFHLRPRDLISNINVIVLELKGSETTFMCEYADETATIVEFLNR WITFCQSIISTLT (SEQ ID NO: 304), where the H16A and F42A substitutions are underlined. In some cases, the IgG1 Fc polypeptide comprises the following amino acid sequence: DKTHTCPPCPAPELLGGPSVFLFPPKPKDTLMISRTPEVTCVVVDVSHEDPEVKFNWYV DGVEVHNAKTKPREEQYASTYRVVSVLTVLHQDWLNGKEYKCKVSNKALPAPIEKTIS KAKGQPREPQVYTLPPSREEMTKNQVSLTCLVKGFYPSDIAVEWESNGQPENNYKTTPP VLDSDGSFFLYSKLTVDKSRWQQGNVFSCSVMHEALHNHYTQKSLSLSPGK (SEQ ID NO: 309). In some cases, the single-chain polypeptide comprises the amino acid sequence depicted in FIG. 28A, without the leader peptide and without the C-terminal linker and histidine tag. For example, in some cases, the single-chain polypeptide comprises amino acids 21-981 of the amino acid sequence depicted in FIG. 28A. In some cases, the single-chain polypeptide does not include a hemagglutinin epitope (e.g., PKYVKQNTLKLAT; SEQ ID NO: 303); instead, the epitope is substituted with a different epitope.

[0576] 2) 1601. In some cases, a single-chain TMAPP of the present disclosure comprises, in order from N-terminus to C-terminus: i) an epitope; ii) an HLA β1 polypeptide; iii) an HLA α1 polypeptide; iv) an HLA α2 polypeptide; v) a first immunomodulatory polypeptide (e.g., a variant immunomodulatory polypeptide with reduced affinity for its cognate co-immunomodulatory polypeptide); vi) a second immunomodulatory polypeptide (e.g., a variant immunomodulatory polypeptide with reduced affinity for its cognate co-immunomodulatory polypeptide); and vii) an Ig Fc polypeptide. As one non-limiting example, a single-chain TMAPP of the present disclosure can comprise, in order from N-terminus to C-terminus: i) an epitope; ii) an HLA DRB1β1 polypeptide; iii) an HLA DRA α1 polypeptide; iv) an HLA DRA α2 polypeptide; v) a first immunomodulatory polypeptide (e.g., a variant IL-2 polypeptide comprising H16A and F42A substitutions); vi) a second immunomodulatory polypeptide (e.g., a variant IL-2 polypeptide comprising H16A and F42A substitutions); and vii) an IgG1 Fc polypeptide. In some cases, the epitope is a hemagglutinin epitope (e.g., PKYVKQNTLKLAT; SEQ ID NO: 303). In some cases, the HLA DRB1 β polypeptide comprises the following amino acid sequence: DTRPRFLWQHKFECHFFNGTERVRLLERCIYNQEESVRFDSDVGEYRAVTELGRPDAEY WNSQKDLLEQRRAAVDTYCRHNYGVGESFTVQRRVEP (SEQ ID NO: 315). In some cases, the HLA DRA α1 polypeptide comprises the following amino acid sequence: IKEEHVIIQAEFYLNPDQSGEFMFDFDGDEIFHVDMAKKETVWRLEEFGRFASFEAQGAL ANIAVDKANLEIMTKRSNYTPITN (SEQ ID NO: 306). In some cases, the HLA DRA α2 polypeptide comprises the following amino acid sequence: VPPEVTVLTNSPVELREPNVLICFIDKFTPPVVNVTWLRNGKPVTTGVSETVFLPREDHL FRKFHYLPFLPSTEDVYDCRVEHWGLDEPLLKHWEFDA (SEQ ID NO: 320). In some cases, the variant IL-2 polypeptide comprises the following amino acid sequence: APTSSSTKKTQLQLEALLLDLQMILNGINNYKNPKLTRMLTAKFYMPKKATELKHLQCL EEELKPLEEVLNLAQSKNFHLRPRDLISNINVIVLELKGSETTFMCEYADETATIVEFLNR WITFCQSIISTLT (SEQ ID NO: 304), where the H16A and F42A substitutions are underlined. In some cases, the IgG1 Fc polypeptide comprises the following amino acid sequence: DKTHTCPPCPAPELLGGPSVFLFPPKPKDTLMISRTPEVTCVVVDVSHEDPEVKFNWYV DGVEVHNAKTKPREEQYASTYRVVSVLTVLHQDWLNGKEYKCKVSNKALPAPIEKTIS KAKGQPREPQVYTLPPSREEMTKNQVSLTCLVKGFYPSDIAVEWESNGQPENNYKTTPP VLDSDGSFFLYSKLTVDKSRWQQGNVFSCSVMHEALHNHYTQKSLSLSPGK (SEQ ID NO: 309). In some cases, the single-chain polypeptide comprises the amino acid sequence depicted in FIG. 29A, without the leader peptide and without the C-terminal linker and histidine tag. For example, in some cases, the single-chain polypeptide comprises amino acids 21-876 of the amino acid sequence depicted in FIG. 29A.

### Antigen-Presenting Polypeptides

[0577] The present disclosure provides an antigen-presenting polypeptide (APP) that does not include an immunomodulatory polypeptide. An APP of the present disclosure can be a single chain polypeptide or a multi-chain (multimeric) polypeptide. An APP of the present disclosure is useful for diagnostic applications and therapeutic applications.

### Multimeric Antigen-Presenting Polypeptides

[0578] In some cases, an APP of the present disclosure comprises two polypeptide chains. In some cases, the two polypeptide chains are covalently linked to one another, e.g., via a disulfide bond. In other instances, the two polypeptide chains are not covalently linked to one another. In some cases, the two polypeptide chains are not covalently linked to one another; and in some of these cases, each of the two polypeptide chains comprises a member of a dimerization pair. Examples of multimeric APPs of the present disclosure are depicted schematically in FIG. 37A and FIG. 37B.

[0579] In some cases, an antigen-presenting multimeric polypeptide (multimeric APP) of the present disclosure comprises: a) a first polypeptide comprising, in order from N-terminus to C-terminus: i) an MHC Class II α1 polypeptide; and ii) an MHC Class II α2 polypeptide; and b) a second polypeptide comprising, in order from N-terminus to C-terminus: i) a peptide antigen (an “epitope”) that is recognized (e.g., is capable of being recognized and bound) by a T-cell receptor (TCR); ii) an MHC Class II β1 polypeptide; and iii) an MHC Class II β2 polypeptide. In some cases, an APP of the present disclosure comprises: a) a first polypeptide comprising, in order from N-terminus to C-terminus: i) an MHC Class II α1 polypeptide; and ii) an MHC Class II α2 polypeptide; and b) a second polypeptide comprising, in order from N-terminus to C-terminus: i) a peptide antigen (an “epitope”) that is recognized (e.g., is capable of being recognized and bound) by a T-cell receptor (TCR); ii) an MHC Class II β1 polypeptide; iii) an MHC Class II β2 polypeptide; and iv) an immunoglobulin or non-immunoglobulin scaffold polypeptide. In some cases, an APP of the present disclosure comprises: a) a first polypeptide comprising, in order from N-terminus to C-terminus: i) an MHC Class II α1 polypeptide; and ii) an MHC Class II α2 polypeptide; and b) a second polypeptide comprising, in order from N-terminus to C-terminus: i) a peptide antigen (an “epitope”) that is recognized (e.g., is capable of being recognized and bound) by a T-cell receptor (TCR); ii) an MHC Class II β1 polypeptide; iii) an MHC Class II β2 polypeptide; and iv) an immunoglobulin (Ig) Fc polypeptide. In some cases, the second polypeptide comprises a linker between the peptide antigen and the MHC Class II β1 polypeptide. In some cases, the second polypeptide comprises a linker between the MHC Class II β1 polypeptide and the immunoglobulin or non-immunoglobulin scaffold polypeptide.

[0580] In some cases, an antigen-presenting multimeric polypeptide (a multimeric APP) of the present disclosure comprises: a) a first polypeptide comprising, in order from N-terminus to C-terminus: i) an MHC Class II α1 polypeptide; ii) an MHC Class II α2 polypeptide; and iii) a first member of a dimerizer pair; and b) a second polypeptide comprising, in order from N-terminus to C-terminus: i) a peptide antigen (an “epitope”) that is recognized (e.g., is capable of being recognized and bound) by a TCR; ii) an MHC Class II β1 polypeptide; iii) an MHC Class II β2 polypeptide; and iv) a second member of the dimerizer pair. The first and the second members of the dimerizer pair bind to one another non-covalently. In some cases, the first and the second members of the dimerizer pair bind to one another non-covalently without the need for a dimerization agent. In some cases, the first and the second members of the dimerizer pair bind to one another non-covalently in the presence of a dimerizer agent. In some cases, an APP of the present disclosure comprises: a) a first polypeptide comprising, in order from N-terminus to C-terminus: i) an MHC Class II α1 polypeptide; ii) an MHC Class II α2 polypeptide; and iii) a first member of a dimerizer pair; and b) a second polypeptide comprising, in order from N-terminus to C-terminus: i) a peptide antigen (an “epitope”) that is recognized (e.g., is capable of being recognized and bound) by a TCR; ii) an MHC Class II β1 polypeptide; iii) an MHC Class II β2 polypeptide; iv) a second member of the dimerizer pair; and v) an immunoglobulin or non-immunoglobulin scaffold polypeptide. In some cases, an APP of the present disclosure comprises: a) a first polypeptide comprising, in order from N-terminus to C-terminus: i) an MHC Class II α1 polypeptide; ii) an MHC Class II α2 polypeptide; and iii) a first member of a dimerizer pair; and b) a second polypeptide comprising, in order from N-terminus to C-terminus: i) a peptide antigen (an “epitope”) that is recognized (e.g., is capable of being recognized and bound) by a TCR; ii) an MHC Class II β1 polypeptide; iii) an MHC Class II β2 polypeptide; iv) a second member of the dimerizer pair; and v) an Ig Fc polypeptide. In some cases, an APP of the present disclosure comprises: a) a first polypeptide comprising, in order from N-terminus to C-terminus: i) an MHC Class II α1 polypeptide; ii) an MHC Class II α2 polypeptide; and iii) a first leucine zipper polypeptide; and b) a second polypeptide comprising, in order from N-terminus to C-terminus: i) a peptide antigen (an “epitope”) that is recognized (e.g., is capable of being recognized and bound) by a TCR; ii) an MHC Class II β1 polypeptide; iii) an MHC Class II β2 polypeptide; iv) a second leucine zipper polypeptide; and v) an Ig Fc polypeptide. In some cases, the second polypeptide comprises a linker between the peptide antigen and the MHC Class II β1 polypeptide. In some cases, the second polypeptide comprises a linker between the MHC Class II β1 polypeptide and the second member of the dimerizing pair. In some cases, the first polypeptide comprises a linker between the MHC Class II α2 polypeptide and the first member of the dimerizing pair.

[0581] In some cases, an antigen-presenting multimeric polypeptide (a multimeric APP) of the present disclosure comprises: a) a first polypeptide comprising, in order from N-terminus to C-terminus: i) a peptide antigen (an “epitope”) that is recognized (e.g., is capable of being recognized and bound) by a TCR; ii) an MHC Class II β1 polypeptide; iii) an MHC Class II α1 polypeptide; iv) an MHC Class II α2 polypeptide; and v) a first member of a dimerizing pair; and b) a second polypeptide comprising, in order from N-terminus to C-terminus: i) an MHC Class II β2 polypeptide; and ii) a second member of the dimerizing pair. In some cases, an APP of the present disclosure comprises: a) a first polypeptide comprising, in order from N-terminus to C-terminus: i) a peptide antigen (an “epitope”) that is recognized (e.g., is capable of being recognized and bound) by a TCR; ii) an MHC Class II β1 polypeptide; iii) an MHC Class II α1 polypeptide; iv) an MHC Class II α2 polypeptide; v) a first member of a dimerizing pair; vi) an immunoglobulin or non-immunoglobulin scaffold polypeptide; and b) a second polypeptide comprising, in order from N-terminus to C-terminus: i) an MHC Class II β2 polypeptide; and ii) a second member of the dimerizing pair. In some cases, an APP of the present disclosure comprises: a) a first polypeptide comprising, in order from N-terminus to C-terminus: i) a peptide antigen (an “epitope”) that is recognized (e.g., is capable of being recognized and bound) by a TCR; ii) an MHC Class II β1 polypeptide; iii) an MHC Class II α1 polypeptide; iv) an MHC Class II α2 polypeptide; v) a first member of a dimerizing pair; vi) an Ig Fc polypeptide; and b) a second polypeptide comprising, in order from N-terminus to C-terminus: i) an MHC Class II β2 polypeptide; and ii) a second member of the dimerizing pair. In some cases, an APP of the present disclosure comprises: a) a first polypeptide comprising, in order from N-terminus to C-terminus: i) a peptide antigen (an “epitope”) that is recognized (e.g., is capable of being recognized and bound) by a TCR; ii) an MHC Class II β1 polypeptide; iii) an MHC Class II α1 polypeptide; iv) an MHC Class II α2 polypeptide; v) a first leucine zipper polypeptide; vi) an Ig Fc polypeptide; and b) a second polypeptide comprising, in order from N-terminus to C-terminus: i) an MHC Class II β2 polypeptide; and ii) a second leucine zipper polypeptide. In some cases, the first polypeptide comprises a linker between the peptide antigen and the MHC Class II β1 polypeptide. In some cases, the first polypeptide comprises a linker between the MHC Class II β1 polypeptide and the MHC Class II α1 polypeptide. In some cases, the first polypeptide comprises a linker between the MHC Class II α2 polypeptide and the first member of the dimerizing pair. In some cases, the second polypeptide comprises a linker between the MHC Class II β2 polypeptide and the second member of the dimerizing pair.

### Monomeric Antigen-Presenting Polypeptides

[0582] In some cases, an APP of the present disclosure is a single polypeptide chain. Examples are depicted schematically in FIG. 37C and FIG. 38A.

[0583] In some cases, an APP (e.g., a single-chain APP) of the present disclosure comprises, in order from N-terminus to C-terminus: i) a peptide antigen (an “epitope”) that is recognized (e.g., is capable of being recognized and bound) by a TCR; ii) an MHC Class II β1 polypeptide; iii) an MHC Class II β2 polypeptide; iv) an MHC Class II α1 polypeptide; and v) an MHC Class II α2 polypeptide. In some cases, an APP of the present disclosure comprises, in order from N-terminus to C-terminus: i) a peptide antigen (an “epitope”) that is recognized (e.g., is capable of being recognized and bound) by a TCR; ii) an MHC Class II β1 polypeptide; iii) an MHC Class II β2 polypeptide; iv) an MHC Class II α1 polypeptide; v) an MHC Class II α2 polypeptide; and vi) an immunoglobulin or non-immunoglobulin scaffold polypeptide. In some cases, an APP of the present disclosure comprises, in order from N-terminus to C-terminus: i) a peptide antigen (an “epitope”) that is recognized (e.g., is capable of being recognized and bound) by a TCR; ii) an MHC Class II β1 polypeptide; iii) an MHC Class II β2 polypeptide; iv) an MHC Class II α1 polypeptide; v) an MHC Class II α2 polypeptide; and vi) an Ig Fc polypeptide. In some cases, the APP comprises a linker between the peptide antigen and the MHC Class II β1 polypeptide. In some cases, the APP comprises a linker between the MHC Class II β2 polypeptide and the MHC Class II α1 polypeptide. In some cases, the APP comprises a linker between the MHC Class II α2 polypeptide and the immunoglobulin or non-immunoglobulin scaffold.

[0584] In some cases, an APP of the present disclosure comprises, in order from N-terminus to C-terminus: i) a peptide antigen (an “epitope”) that is recognized (e.g., is capable of being recognized and bound) by a TCR; ii) an MHC Class II β1 polypeptide; iii) an MHC Class II α1 polypeptide; iv) an MHC Class II α2 polypeptide; and v) an MHC Class II β2 polypeptide. In some cases, an APP of the present disclosure comprises, in order from N-terminus to C-terminus: i) a peptide antigen (an “epitope”) that is recognized (e.g., is capable of being recognized and bound) by a TCR; ii) an MHC Class II β1 polypeptide; iii) an MHC Class II α1 polypeptide; iv) an MHC Class II α2 polypeptide; v) an MHC Class II β2 polypeptide; and vi) an immunoglobulin or non-immunoglobulin scaffold polypeptide. In some cases, an APP of the present disclosure comprises, in order from N-terminus to C-terminus: i) a peptide antigen (an “epitope”) that is recognized (e.g., is capable of being recognized and bound) by a TCR; ii) an MHC Class II β1 polypeptide; iii) an MHC Class II α1 polypeptide; iv) an MHC Class II α2 polypeptide; v) an MHC Class II β2 polypeptide; and vi) an Ig Fc polypeptide. In some cases, the APP comprises a linker between the peptide antigen and the MHC Class II β1 polypeptide. In some cases, the APP comprises a linker between the MHC Class II β1 polypeptide and the MHC Class II α1 polypeptide. In some cases, the APP comprises a linker between the MHC Class II α2 polypeptide and the MHC Class II β2 polypeptide. In some cases, the APP comprises a linker between the MHC Class II β2 polypeptide and the Ig or non-Ig scaffold.

[0585] In some cases, a single-chain APP of the present disclosure comprises, in order from N-terminus to C-terminus: i) an epitope; ii) an HLA β1 polypeptide; iii) an HLA α1 polypeptide; iv) an HLA α2 polypeptide; v) an HLA β2 polypeptide; and vi) an Ig Fc polypeptide. As one non-limiting example, a single-chain APP of the present disclosure can comprise, in order from N-terminus to C-terminus: i) an epitope; ii) an HLA DRB1 β1 polypeptide; iii) an HLA DRA α1 polypeptide; iv) an HLA DRA α2 polypeptide; v) an HLA DRB β2 polypeptide; and vi) an IgG1 Fc polypeptide. In some cases, the epitope is a hemagglutinin epitope (PKYVKQNTLKLAT; SEQ ID NO: 303). In other instances, the epitope is not PKYVKQNTLKLAT (SEQ ID NO: 303); instead, the epitope is substituted with a different epitope. In some cases, the single-chain polypeptide comprises the 1559 amino acid sequence depicted in FIG. 27A, without the leader peptide and without the C-terminal linker and histidine tag. For example, in some cases, the single-chain polypeptide comprises amino acids 21-700 of the amino acid sequence depicted in FIG. 27A.

### MHC Class II Polypeptides

[0586] As noted above, an APP of the present disclosure comprises MHC Class II polypeptides, i.e., an MHC Class II α chain polypeptide and an MHC Class II β chain polypeptide. Suitable MHC Class II α chain polypeptides and MHC Class II β chain polypeptides are described above.

### Fc Polypeptides

[0587] As noted above, in some cases, an APP of the present disclosure can comprise an Ig Fc polypeptide. For example, where the APP is a multimeric polypeptide, in some cases, the first and/or the second polypeptide chain of a multimeric polypeptide comprises an Fc polypeptide. In some cases, an APP of the present disclosure is a monomeric polypeptide and comprises an Ig Fc polypeptide. The Fc polypeptide can be a human IgG1 Fc, a human IgG2 Fc, a human IgG3 Fc, a human IgG4 Fc, etc.

[0588] In some cases, the Fc polypeptide comprises an amino acid sequence having at least about 70%, at least about 75%, at least about 80%, at least about 85%, at least about 90%, at least about 95%, at least about 98%, at least about 99%, or 100%, amino acid sequence identity to an amino acid sequence of an Fc region depicted in FIG. 21A-21G. In some cases, the Fc region comprises an amino acid sequence having at least about 70%, at least about 75%, at least about 80%, at least about 85%, at least about 90%, at least about 95%, at least about 98%, at least about 99%, or 100%, amino acid sequence identity to the human IgG1 Fc polypeptide depicted in FIG. 21A. In some cases, the Fc region comprises an amino acid sequence having at least about 70%, at least about 75%, at least about 80%, at least about 85%, at least about 90%, at least about 95%, at least about 98%, at least about 99%, or 100%, amino acid sequence identity to the human IgG1 Fc polypeptide depicted in FIG. 21A; and comprises a substitution of N77; e.g., the Fc polypeptide comprises an N77A substitution. In some cases, the Fc polypeptide comprises an amino acid sequence having at least about 70%, at least about 75%, at least about 80%, at least about 85%, at least about 90%, at least about 95%, at least about 98%, at least about 99%, or 100%, amino acid sequence identity to the human IgG2 Fc polypeptide depicted in FIG. 21A; e.g., the Fc polypeptide comprises an amino acid sequence having at least about 70%, at least about 75%, at least about 80%, at least about 85%, at least about 90%, at least about 95%, at least about 98%, at least about 99%, or 100%, amino acid sequence identity to amino acids 99-325 of the human IgG2 Fc polypeptide depicted in FIG. 21A. In some cases, the Fc polypeptide comprises an amino acid sequence having at least about 70%, at least about 75%, at least about 80%, at least about 85%, at least about 90%, at least about 95%, at least about 98%, at least about 99%, or 100%, amino acid sequence identity to the human IgG3 Fc polypeptide depicted in FIG. 21A; e.g., the Fc polypeptide comprises an amino acid sequence having at least about 70%, at least about 75%, at least about 80%, at least about 85%, at least about 90%, at least about 95%, at least about 98%, at least about 99%, or 100%, amino acid sequence identity to amino acids 19-246 of the human IgG3 Fc polypeptide depicted in FIG. 21A. In some cases, the Fc polypeptide comprises an amino acid sequence having at least about 70%, at least about 75%, at least about 80%, at least about 85%, at least about 90%, at least about 95%, at least about 98%, at least about 99%, or 100%, amino acid sequence identity to the human IgM Fc polypeptide depicted in FIG. 21B; e.g., the Fc polypeptide comprises an amino acid sequence having at least about 70%, at least about 75%, at least about 80%, at least about 85%, at least about 90%, at least about 95%, at least about 98%, at least about 99%, or 100%, amino acid sequence identity to amino acids 1-276 to the human IgM Fc polypeptide depicted in FIG. 21B. In some cases, the Fc polypeptide comprises an amino acid sequence having at least about 70%, at least about 75%, at least about 80%, at least about 85%, at least about 90%, at least about 95%, at least about 98%, at least about 99%, or 100%, amino acid sequence identity to the human IgA Fc polypeptide depicted in FIG. 21C; e.g., the Fc polypeptide comprises an amino acid sequence having at least about 70%, at least about 75%, at least about 80%, at least about 85%, at least about 90%, at least about 95%, at least about 98%, at least about 99%, or 100%, amino acid sequence identity to amino acids 1-234 to the human IgA Fc polypeptide depicted in FIG. 21C.

[0589] In some cases, the Fc polypeptide comprises an amino acid sequence having at least about 70%, at least about 75%, at least about 80%, at least about 85%, at least about 90%, at least about 95%, at least about 98%, at least about 99%, or 100%, amino acid sequence identity to the human IgG4 Fc polypeptide depicted in FIG. 21C. In some cases, the Fc polypeptide comprises an amino acid sequence having at least about 70%, at least about 75%, at least about 80%, at least about 85%, at least about 90%, at least about 95%, at least about 98%, at least about 99%, or 100%, amino acid sequence identity to amino acids 100 to 327 of the human IgG4 Fc polypeptide depicted in FIG. 21C.

[0590] In some cases, the IgG4 Fc polypeptide comprises the following amino acid sequence:

(SEQ ID NO: 321)
PPCPSCPAPEFLGGPSVFLFPPKPKDTLMISRTPEVTCVVVDVSQEDPEVQ
FNWYVDGVEVHNAKTKPREEQFNSTYRVVSVLTVLHQDWLNGKEYKCKVSN
KGLPSSIEKTISKAKGQPREPQVYTLPPSQEEMTKNQVSLTCLVKGFYPSD
IAVEWESNGQPENNYKTTPPVLDSDGSFFLYSRLTVDKSRWQEGNVFSCSV
MHEALHNHYTQKSLSLSPG.

[0591] In some cases, the Fc polypeptide present in an APP of the present disclosure comprises the amino acid sequence depicted in FIG. 21A (human IgG1 Fc). In some cases, the Fc polypeptide present in an APP of the present disclosure comprises the amino acid sequence depicted in FIG. 21A (human IgG1 Fc), except for a substitution of N297 (N77 of the amino acid sequence depicted in FIG. 21A) with an amino acid other than asparagine. In some cases, the Fc polypeptide present in an APP of the present disclosure comprises the amino acid sequence depicted in FIG. 21C (human IgG1 Fc comprising an N297A substitution, which is N77 of the amino acid sequence depicted in FIG. 21A). In some cases, the Fc polypeptide present in an APP of the present disclosure comprises the amino acid sequence depicted in FIG. 21A (human IgG1 Fc), except for a substitution of L234 (L14 of the amino acid sequence depicted in FIG. 21A) with an amino acid other than leucine. In some cases, the Fc polypeptide present in an APP of the present disclosure comprises the amino acid sequence depicted in FIG. 21A (human IgG1 Fc), except for a substitution of L235 (L15 of the amino acid sequence depicted in FIG. 21A) with an amino acid other than leucine.

[0592] In some cases, the Fc polypeptide present in an APP of the present disclosure comprises the amino acid sequence depicted in FIG. 21E. In some cases, the Fc polypeptide present in an APP of the present disclosure comprises the amino acid sequence depicted in FIG. 21F. In some cases, the Fc polypeptide present in an APP of the present disclosure comprises the amino acid sequence depicted in FIG. 21G (human IgG1 Fc comprising an L234A substitution and an L235A substitution, corresponding to positions 14 and 15 of the amino acid sequence depicted in FIG. 21G). In some cases, the Fc polypeptide present in an APP of the present disclosure comprises the amino acid sequence depicted in FIG. 21A (human IgG1 Fc), except for a substitution of P331 (P111 of the amino acid sequence depicted in FIG. 21A) with an amino acid other than proline; in some cases, the substitution is a P331S substitution. In some cases, the Fc polypeptide present in an APP of the present disclosure comprises the amino acid sequence depicted in FIG. 21A (human IgG1 Fc), except for substitutions at L234 and L235 (L14 and L15 of the amino acid sequence depicted in FIG. 21A) with amino acids other than leucine. In some cases, the Fc polypeptide present in an APP of the present disclosure comprises the amino acid sequence depicted in FIG. 21A (human IgG1 Fc), except for substitutions at L234 and L235 (L14 and L15 of the amino acid sequence depicted in FIG. 21A) with amino acids other than leucine, and a substitution of P331 (P111 of the amino acid sequence depicted in FIG. 21A) with an amino acid other than proline. In some cases, the Fc polypeptide present in an APP of the present disclosure comprises the amino acid sequence depicted in FIG. 21E (human IgG1 Fc comprising L234F, L235E, and P331S substitutions (corresponding to amino acid positions 14, 15, and 111 of the amino acid sequence depicted in FIG. 21E). In some cases, the Fc polypeptide present in an APP of the present disclosure is an IgG1 Fc polypeptide that comprises L234A and L235A substitutions (substitutions of L14 and L15 of the amino acid sequence depicted in FIG. 21A with Ala), as depicted in FIG. 21G.

### Nucleic Acids

[0593] The present disclosure provides a nucleic acid comprising a nucleotide sequence encoding a TMAPP of the present disclosure. In some cases, the nucleic acid is a recombinant expression vector; thus, the present disclosure provides a recombinant expression vector comprising a nucleotide sequence encoding a TMAPP of the present disclosure. The present disclosure provides a nucleic acid comprising a nucleotide sequence encoding an APP of the present disclosure. In some cases, the nucleic acid is a recombinant expression vector; thus, the present disclosure provides a recombinant expression vector comprising a nucleotide sequence encoding an APP of the present disclosure. The discussion, below, of nucleic acids refers to nucleic acids encoding TMAPPs of the present disclosure; however, the discussion applies as well to nucleic acids encoding APPs of the present disclosure.

### Nucleic Acids Encoding Single-Chain Antigen-Presenting Polypeptides of the Present Disclosure

[0594] As described above, in some cases, a TMAPP of the present disclosure comprises a single polypeptide chain. Thus, the present disclosure provides a nucleic acid comprising a nucleotide sequence encoding a single-chain TMAPP of the present disclosure. A nucleotide sequence comprising a nucleotide sequence encoding a single-chain TMAPP of the present disclosure can be operably linked to a transcription control element(s), e.g., a promoter.

### Nucleic Acid(s) Encoding Multimeric Polypeptides of the Present Disclosure

[0595] As noted above, in some cases, a TMAPP of the present disclosure comprises at least 2 separate polypeptide chains. The present disclosure provides nucleic acids comprising nucleotide sequences encoding a multimeric TMAPP of the present disclosure. In some cases, the individual polypeptide chains of a multimeric TMAPP of the present disclosure are encoded in separate nucleic acids. In some cases, all polypeptide chains of a multimeric polypeptide of the present disclosure are encoded in a single nucleic acid. In some cases, a first nucleic acid comprises a nucleotide sequence encoding a first polypeptide of a multimeric polypeptide of the present disclosure; and a second nucleic acid comprises a nucleotide sequence encoding a second polypeptide of a multimeric polypeptide of the present disclosure. In some cases, single nucleic acid comprises a nucleotide sequence encoding a first polypeptide of a multimeric polypeptide of the present disclosure and a second polypeptide of a multimeric polypeptide of the present disclosure.

### Separate Nucleic Acids Encoding Individual Polypeptide Chains of a Multimeric TMAPP

[0596] The present disclosure provides nucleic acids comprising nucleotide sequences encoding a TMAPP of the present disclosure. As noted above, in some cases, the individual polypeptide chains of a multimeric TMAPP of the present disclosure are encoded in separate nucleic acids. In some cases, nucleotide sequences encoding the separate polypeptide chains of a TMAPP of the present disclosure are operably linked to transcriptional control elements, e.g., promoters, such as promoters that are functional in a eukaryotic cell, where the promoter can be a constitutive promoter or an inducible promoter.

[0597] For example, the present disclosure provides a first nucleic acid and a second nucleic acid, where the first nucleic acid comprises a nucleotide sequence encoding the first polypeptide of a TMAPP of the present disclosure, and where the second nucleic acid comprises a nucleotide sequence encoding the second polypeptide of the TMAPP. In some cases, the nucleotide sequences encoding the first and the second polypeptides are operably linked to transcriptional control elements. In some cases, the transcriptional control element is a promoter that is functional in a eukaryotic cell. In some cases, the nucleic acids are present in separate expression vectors.

[0598] In some cases, the nucleotide sequences encoding the first and the second polypeptides are operably linked to transcriptional control elements. In some cases, the transcriptional control element is a promoter that is functional in a eukaryotic cell. In some cases, the nucleic acids are present in separate expression vectors.

### Nucleic Acid Encoding Two or More Polypeptides Present in a TMAPP

[0599] The present disclosure provides a nucleic acid comprising nucleotide sequences encoding at least the first polypeptide and the second polypeptide of a TMAPP of the present disclosure. In some cases, where a TMAPP of the present disclosure includes a first, second, and third polypeptide, the nucleic acid includes a nucleotide sequence encoding the first, second, and third polypeptides. In some cases, the nucleotide sequences encoding the first polypeptide and the second polypeptide of a TMAPP of the present disclosure includes a proteolytically cleavable linker interposed between the nucleotide sequence encoding the first polypeptide and the nucleotide sequence encoding the second polypeptide. In some cases, the nucleotide sequences encoding the first polypeptide and the second polypeptide of a TMAPP of the present disclosure includes an internal ribosome entry site (IRES) interposed between the nucleotide sequence encoding the first polypeptide and the nucleotide sequence encoding the second polypeptide. In some cases, the nucleotide sequences encoding the first polypeptide and the second polypeptide of a TMAPP of the present disclosure includes a ribosome skipping signal (or cis-acting hydrolase element, CHYSEL) interposed between the nucleotide sequence encoding the first polypeptide and the nucleotide sequence encoding the second polypeptide. Examples of nucleic acids are described below, where a proteolytically cleavable linker is provided between nucleotide sequences encoding the first polypeptide and the second polypeptide of a TMAPP of the present disclosure; in any of these embodiments, an IRES or a ribosome skipping signal can be used in place of the nucleotide sequence encoding the proteolytically cleavable linker.

[0600] In some cases, a first nucleic acid (e.g., a recombinant expression vector, an mRNA, a viral RNA, etc.) comprises a nucleotide sequence encoding a first polypeptide chain of a TMAPP of the present disclosure; and a second nucleic acid (e.g., a recombinant expression vector, an mRNA, a viral RNA, etc.) comprises a nucleotide sequence encoding a second polypeptide chain of a TMAPP of the present disclosure. In some cases, the nucleotide sequence encoding the first polypeptide, and the second nucleotide sequence encoding the second polypeptide, are each operably linked to transcriptional control elements, e.g., promoters, such as promoters that are functional in a eukaryotic cell, where the promoter can be a constitutive promoter or an inducible promoter.

### Recombinant Expression Vectors

[0601] The present disclosure provides recombinant expression vectors comprising nucleic acids of the present disclosure. In some cases, the recombinant expression vector is a non-viral vector. In some cases, the recombinant expression vector is a viral construct, e.g., a recombinant adeno-associated virus construct (see, e.g., U.S. Pat. No. 7,078,387), a recombinant adenoviral construct, a recombinant lentiviral construct, a recombinant retroviral construct, a non-integrating viral vector, etc.

[0602] Suitable expression vectors include, but are not limited to, viral vectors (e.g. viral vectors based on vaccinia virus; poliovirus; adenovirus (see, e.g., Li et al., Invest Opthalmol Vis Sci 35:2543 2549, 1994; Borras et al., Gene Ther 6:515 524, 1999; Li and Davidson, PNAS 92:7700 7704, 1995; Sakamoto et al., H Gene Ther 5:1088 1097, 1999; WO 94/12649, WO 93/03769; WO 93/19191; WO 94/28938; WO 95/11984 and WO 95/00655); adeno-associated virus (see, e.g., Ali et al., Hum Gene Ther 9:81 86, 1998, Flannery et al., PNAS 94:6916 6921, 1997; Bennett et al., Invest Opthalmol Vis Sci 38:2857 2863, 1997; Jomary et al., Gene Ther 4:683 690, 1997, Rolling et al., Hum Gene Ther 10:641 648, 1999; Ali et al., Hum Mol Genet 5:591 594, 1996; Srivastava in WO 93/09239, Samulski et al., J. Vir. (1989) 63:3822-3828; Mendelson et al., Virol. (1988) 166:154-165; and Flotte et al., PNAS (1993) 90:10613-10617); SV40; herpes simplex virus; human immunodeficiency virus (see, e.g., Miyoshi et al., PNAS 94:10319 23, 1997; Takahashi et al., J Virol 73:7812 7816, 1999); a retroviral vector (e.g., Murine Leukemia Virus, spleen necrosis virus, and vectors derived from retroviruses such as Rous Sarcoma Virus, Harvey Sarcoma Virus, avian leukosis virus, a lentivirus, human immunodeficiency virus, myeloproliferative sarcoma virus, and mammary tumor virus); and the like. Numerous suitable expression vectors are known to those of skill in the art, and many are commercially available.

[0603] Depending on the host/vector system utilized, any of a number of suitable transcription and translation control elements, including constitutive and inducible promoters, transcription enhancer elements, transcription terminators, etc. may be used in the expression vector (see e.g., Bitter et al. (1987) Methods in Enzymology, 153:516-544).

[0604] In some cases, a nucleotide sequence encoding an APP of the present disclosure is operably linked to a control element, e.g., a transcriptional control element, such as a promoter. The transcriptional control element may be functional in either a eukaryotic cell, e.g., a mammalian cell; or a prokaryotic cell (e.g., bacterial or archaeal cell). In some cases, a nucleotide sequence encoding a DNA-targeting RNA and/or a site-directed modifying polypeptide is operably linked to multiple control elements that allow expression of the nucleotide sequence encoding a DNA-targeting RNA and/or a site-directed modifying polypeptide in both prokaryotic and eukaryotic cells.

[0605] Non-limiting examples of suitable eukaryotic promoters (promoters functional in a eukaryotic cell) include those from cytomegalovirus (CMV) immediate early, herpes simplex virus (HSV) thymidine kinase, early and late SV40, long terminal repeats (LTRs) from retrovirus, and mouse metallothionein-I. Selection of the appropriate vector and promoter is well within the level of ordinary skill in the art. The expression vector may also contain a ribosome binding site for translation initiation and a transcription terminator. The expression vector may also include appropriate sequences for amplifying expression.

### Genetically Modified Host Cells

[0606] The present disclosure provides a genetically modified host cell, where the host cell is genetically modified with a nucleic acid(s) of the present disclosure.

[0607] Suitable host cells include eukaryotic cells, such as yeast cells, insect cells, and mammalian cells. In some cases, the host cell is a cell of a mammalian cell line. Suitable mammalian cell lines include human cell lines, non-human primate cell lines, rodent (e.g., mouse, rat) cell lines, and the like. Suitable mammalian cell lines include, but are not limited to, HeLa cells (e.g., American Type Culture Collection (ATCC) No. CCL-2), CHO cells (e.g., ATCC Nos. CRL9618, CCL61, CRL9096), 293 cells (e.g., ATCC No. CRL-1573), Vero cells, NIH 3T3 cells (e.g., ATCC No. CRL-1658), Huh-7 cells, BHK cells (e.g., ATCC No. CCL10), PC12 cells (ATCC No. CRL1721), COS cells, COS-7 cells (ATCC No. CRL1651), RAT1 cells, mouse L cells (ATCC No. CCLI.3), human embryonic kidney (HEK) cells (ATCC No. CRL1573), HLHepG2 cells, and the like.

[0608] Genetically modified host cells can be used to produce a TMAPP of the present disclosure. For example, a genetically modified host cell can be used to produce a multimeric TMAPP of the present disclosure, or a single-chain TMAPP of the present disclosure. An expression vector(s) comprising nucleotide sequences encoding the polypeptide(s) is/are introduced into a host cell, generating a genetically modified host cell, which genetically modified host cell produces the polypeptide(s).

### Compositions

[0609] The present disclosure provides compositions, including pharmaceutical compositions, comprising a TMAPP or an APP of the present disclosure. The present disclosure provides compositions, including pharmaceutical compositions, comprising a nucleic acid or a recombinant expression vector of the present disclosure. The discussion, below, of compositions refers to compositions comprising a TMAPP of the present disclosure; however, the discussion applies equally to an APP of the present disclosure.

### Compositions Comprising a TMAPP

[0610] A composition of the present disclosure can comprise, in addition to a TMAPP of the present disclosure, one or more of: a salt, e.g., NaCl, MgCl₂, KCl, MgSO₄, etc.; a buffering agent, e.g., a Tris buffer, N-(2-Hydroxyethyl)piperazine-N′-(2-ethanesulfonic acid) (HEPES), 2-(N-Morpholino)ethanesulfonic acid (MES), 2-(N-Morpholino)ethanesulfonic acid sodium salt (MES), 3-(N-Morpholino)propanesulfonic acid (MOPS), N-tris[Hydroxymethyl]methyl-3-aminopropanesulfonic acid (TAPS), etc.; a solubilizing agent; a detergent, e.g., a non-ionic detergent such as Tween-20, etc.; a protease inhibitor; glycerol; and the like.

[0611] The composition may comprise a pharmaceutically acceptable excipient, a variety of which are known in the art and need not be discussed in detail herein. Pharmaceutically acceptable excipients have been amply described in a variety of publications, including, for example, “Remington: The Science and Practice of Pharmacy”, 19^{th} Ed. (1995), or latest edition, Mack Publishing Co; A. Gennaro (2000) “Remington: The Science and Practice of Pharmacy”, 20th edition, Lippincott, Williams, & Wilkins; Pharmaceutical Dosage Forms and Drug Delivery Systems (1999) H. C. Ansel et al., eds 7^{th} ed., Lippincott, Williams, & Wilkins; and Handbook of Pharmaceutical Excipients (2000) A. H. Kibbe et al., eds., 3^{rd} ed. Amer. Pharmaceutical Assoc.

[0612] A pharmaceutical composition can comprise: i) a TMAPP of the present disclosure; and ii) a pharmaceutically acceptable excipient. In some cases, a subject pharmaceutical composition will be suitable for administration to a subject, e.g., will be sterile. For example, in some embodiments, a subject pharmaceutical composition will be suitable for administration to a human subject, e.g., where the composition is sterile and is free of detectable pyrogens and/or other toxins.

[0613] The protein compositions may comprise other components, such as pharmaceutical grades of mannitol, lactose, starch, magnesium stearate, sodium saccharin, talcum, cellulose, glucose, sucrose, magnesium, carbonate, and the like. The compositions may contain pharmaceutically acceptable auxiliary substances as required to approximate physiological conditions such as pH adjusting and buffering agents, toxicity adjusting agents and the like, for example, sodium acetate, sodium chloride, potassium chloride, calcium chloride, sodium lactate, hydrochloride, sulfate salts, solvates (e.g., mixed ionic salts, water, organics), hydrates (e.g., water), and the like.

[0614] For example, compositions may include aqueous solution, powder form, granules, tablets, pills, suppositories, capsules, suspensions, sprays, and the like. The composition may be formulated according to the various routes of administration described below.

[0615] Where a TMAPP of the present disclosure is administered as an injectable (e.g. subcutaneously, intraperitoneally, intramuscularly, intralymphatically, and/or intravenously) directly into a tissue, a formulation can be provided as a ready-to-use dosage form, or as non-aqueous form (e.g. a reconstitutable storage-stable powder) or aqueous form, such as liquid composed of pharmaceutically acceptable carriers and excipients. The protein-containing formulations may also be provided so as to enhance serum half-life of the subject protein following administration. For example, the protein may be provided in a liposome formulation, prepared as a colloid, or other conventional techniques for extending serum half-life. A variety of methods are available for preparing liposomes, as described in, e.g., Szoka et al. 1980 Ann. Rev. Biophys. Bioeng. 9:467, U.S. Pat. Nos. 4,235,871, 4,501,728 and 4,837,028. The preparations may also be provided in controlled release or slow-release forms.

[0616] In some cases, a composition of the present disclosure comprises: a) a TMAPP of the present disclosure; and b) saline (e.g., 0.9% NaCl). In some cases, the composition is sterile. In some cases, the composition is suitable for administration to a human subject, e.g., where the composition is sterile and is free of detectable pyrogens and/or other toxins. Thus, the present disclosure provides a composition comprising: a) a TMAPP of the present disclosure; and b) saline (e.g., 0.9% NaCl), where the composition is sterile and is free of detectable pyrogens and/or other toxins.

[0617] Other examples of formulations suitable for parenteral administration include isotonic sterile injection solutions, anti-oxidants, bacteriostats, and solutes that render the formulation isotonic with the blood of the intended recipient, suspending agents, solubilizers, thickening agents, stabilizers, and preservatives. For example, a subject pharmaceutical composition can be present in a container, e.g., a sterile container, such as a syringe. The formulations can be presented in unit-dose or multi-dose sealed containers, such as ampules and vials, and can be stored in a freeze-dried (lyophilized) condition requiring only the addition of the sterile liquid excipient, for example, water, for injections, immediately prior to use. Extemporaneous injection solutions and suspensions can be prepared from sterile powders, granules, and tablets.

[0618] The concentration of a TMAPP of the present disclosure in a formulation can vary widely (e.g., from less than about 0.1%, usually at or at least about 2% to as much as 20% to 50% or more by weight) and will usually be selected primarily based on fluid volumes, viscosities, and patient-based factors in accordance with the particular mode of administration selected and the patient's needs.

[0619] The present disclosure provides a container comprising a composition of the present disclosure, e.g., a liquid composition. The container can be, e.g., a syringe, an ampoule, and the like. In some cases, the container is sterile. In some cases, both the container and the composition are sterile.

### Compositions Comprising a Nucleic Acid or a Recombinant Expression Vector

[0620] The present disclosure provides compositions, e.g., pharmaceutical compositions, comprising a nucleic acid or a recombinant expression vector of the present disclosure. A wide variety of pharmaceutically acceptable excipients is known in the art and need not be discussed in detail herein. Pharmaceutically acceptable excipients have been amply described in a variety of publications, including, for example, A. Gennaro (2000) “Remington: The Science and Practice of Pharmacy”, 20th edition, Lippincott, Williams, & Wilkins; Pharmaceutical Dosage Forms and Drug Delivery Systems (1999) H. C. Ansel et al., eds 7^{th} ed., Lippincott, Williams, & Wilkins; and Handbook of Pharmaceutical Excipients (2000) A. H. Kibbe et al., eds., 3^{rd} ed. Amer. Pharmaceutical Assoc.

[0621] A composition of the present disclosure can include: a) one or more nucleic acids or one or more recombinant expression vectors comprising nucleotide sequences encoding a TMAPP of the present disclosure; and b) one or more of: a buffer, a surfactant, an antioxidant, a hydrophilic polymer, a dextrin, a chelating agent, a suspending agent, a solubilizer, a thickening agent, a stabilizer, a bacteriostatic agent, a wetting agent, and a preservative. Suitable buffers include, but are not limited to, (such as N,N-bis(2-hydroxyethyl)-2-aminoethanesulfonic acid (BES), bis(2-hydroxyethyl)amino-tris(hydroxymethyl)methane (BIS-Tris), N-(2-hydroxyethyl)piperazine-N′3-propanesulfonic acid (EPPS or HEPPS), glycylglycine, N-2-hydroxyehtylpiperazine-N′-2-ethanesulfonic acid (HEPES), 3-(N-morpholino)propane sulfonic acid (MOPS), piperazine-N,N′-bis(2-ethane-sulfonic acid) (PIPES), sodium bicarbonate, 3-(N-tris(hydroxymethyl)-methyl-amino)-2-hydroxy-propanesulfonic acid) TAPSO, (N-tris(hydroxymethyl)methyl-2-aminoethanesulfonic acid (TES), N-tris(hydroxymethyl)methyl-glycine (Tricine), tris(hydroxymethyl)-aminomethane (Tris), etc.). Suitable salts include, e.g., NaCl, MgCl₂, KCl, MgSO₄, etc.

[0622] A pharmaceutical formulation of the present disclosure can include a nucleic acid or recombinant expression vector of the present disclosure in an amount of from about 0.001% to about 90% (w/w). In the description of formulations, below, “subject nucleic acid or recombinant expression vector” will be understood to include a nucleic acid or recombinant expression vector of the present disclosure. For example, in some cases, a subject formulation comprises a nucleic acid or recombinant expression vector of the present disclosure.

[0623] A subject nucleic acid or recombinant expression vector can be admixed, encapsulated, conjugated or otherwise associated with other compounds or mixtures of compounds; such compounds can include, e.g., liposomes or receptor-targeted molecules. A subject nucleic acid or recombinant expression vector can be combined in a formulation with one or more components that assist in uptake, distribution and/or absorption.

[0624] A subject nucleic acid or recombinant expression vector composition can be formulated into any of many possible dosage forms such as, but not limited to, tablets, capsules, gel capsules, liquid syrups, soft gels, suppositories, and enemas. A subject nucleic acid or recombinant expression vector composition can also be formulated as suspensions in aqueous, non-aqueous or mixed media. Aqueous suspensions may further contain substances which increase the viscosity of the suspension including, for example, sodium carboxymethylcellulose, sorbitol and/or dextran. The suspension may also contain stabilizers.

[0625] A formulation comprising a subject nucleic acid or recombinant expression vector can be a liposomal formulation. As used herein, the term “liposome” means a vesicle composed of amphiphilic lipids arranged in a spherical bilayer or bilayers. Liposomes are unilamellar or multilamellar vesicles which have a membrane formed from a lipophilic material and an aqueous interior that contains the composition to be delivered. Cationic liposomes are positively charged liposomes that can interact with negatively charged DNA molecules to form a stable complex. Liposomes that are pH sensitive or negatively charged are believed to entrap DNA rather than complex with it. Both cationic and noncationic liposomes can be used to deliver a subject nucleic acid or recombinant expression vector.

[0626] Liposomes also include “sterically stabilized” liposomes, a term which, as used herein, refers to liposomes comprising one or more specialized lipids that, when incorporated into liposomes, result in enhanced circulation lifetimes relative to liposomes lacking such specialized lipids. Examples of sterically stabilized liposomes are those in which part of the vesicle-forming lipid portion of the liposome comprises one or more glycolipids or is derivatized with one or more hydrophilic polymers, such as a polyethylene glycol (PEG) moiety. Liposomes and their uses are further described in U.S. Pat. No. 6,287,860, which is incorporated herein by reference in its entirety.

[0627] The formulations and compositions of the present disclosure may also include surfactants. The use of surfactants in drug products, formulations and in emulsions is well known in the art. Surfactants and their uses are further described in U.S. Pat. No. 6,287,860.

[0628] In one embodiment, various penetration enhancers are included, to effect the efficient delivery of nucleic acids. In addition to aiding the diffusion of non-lipophilic drugs across cell membranes, penetration enhancers also enhance the permeability of lipophilic drugs. Penetration enhancers may be classified as belonging to one of five broad categories, i.e., surfactants, fatty acids, bile salts, chelating agents, and non-chelating non-surfactants. Penetration enhancers and their uses are further described in U.S. Pat. No. 6,287,860, which is incorporated herein by reference in its entirety.

[0629] Compositions and formulations for oral administration include powders or granules, microparticulates, nanoparticulates, suspensions or solutions in water or non-aqueous media, capsules, gel capsules, sachets, tablets, or minitablets. Thickeners, flavoring agents, diluents, emulsifiers, dispersing aids or binders may be desirable. Suitable oral formulations include those in which a subject antisense nucleic acid is administered in conjunction with one or more penetration enhancers surfactants and chelators. Suitable surfactants include, but are not limited to, fatty acids and/or esters or salts thereof, bile acids and/or salts thereof. Suitable bile acids/salts and fatty acids and their uses are further described in U.S. Pat. No. 6,287,860. Also suitable are combinations of penetration enhancers, for example, fatty acids/salts in combination with bile acids/salts. An exemplary suitable combination is the sodium salt of lauric acid, capric acid, and UDCA. Further penetration enhancers include, but are not limited to, polyoxyethylene-9-lauryl ether, and polyoxyethylene-20-cetyl ether. Suitable penetration enhancers also include propylene glycol, dimethylsulfoxide, triethanolamine, N,N-dimethylacetamide, N,N-dimethylformamide, 2-pyrrolidone and derivatives thereof, tetrahydrofurfuryl alcohol, and AZONE™.

### Methods

[0630] A TMAPP of the present disclosure is useful for modulating an activity of a T cell. Thus, the present disclosure provides methods of modulating an activity of a T cell, the methods generally involving contacting a target T cell with a TMAPP of the present disclosure.

[0631] An APP of the present disclosure is useful for various research, therapeutic, and diagnostic purposes. For example, an APP of the present disclosure can be used to label, directly or indirectly, an antigen-specific T cell.

### Methods of Modulating T Cell Activity

[0632] The present disclosure provides a method of selectively modulating the activity of an epitope-specific T cell, the method comprising contacting the T cell with a TMAPP of the present disclosure, where contacting the T cell with a TMAPP of the present disclosure selectively modulates the activity of the epitope-specific T cell. In some cases, the contacting occurs in vitro. In some cases, the contacting occurs in vivo. In some cases, the contacting occurs ex vivo.

[0633] In some cases, a TMAPP of the present disclosure reduces activity of an autoreactive T cell and/or an autoreactive B cell. In some cases, a TMAPP of the present disclosure increases the number and/or activity of a regulator T cell (Treg), resulting in reduced activity of an autoreactive T cell and/or an autoreactive B cell.

[0634] In some cases, the T cell being contacted with a TMAPP of the present disclosure is a regulatory T cell (Treg). Tregs are CD4⁺, FOXP3⁺, and CD25⁺. Tregs can suppress autoreactive T cells. In some cases, a method of the present disclosure activates Tregs, thereby reducing autoreactive T cell activity.

[0635] The present disclosure provides a method of increasing proliferation of Tregs, the method comprising contacting Tregs with a TMAPP of the present disclosure, where the contacting increases proliferation of Tregs. The present disclosure provides a method of increasing the number of Tregs in an individual, the method comprising administering to the individual a TMAPP of the present disclosure, where the administering results in an increase in the number of Tregs in the individual. For example, the number of Tregs can be increased by at least 5%, at least 10%, at least 15%, at least 20%, at least 25%, at least 30%, at least 40%, at least 50%, at least 60%, at least 70%, at least 80%, at least 90%, at least 2-fold, at least 2.5-fold, at least 5-fold, at least 10-fold, or more than 10-fold.

[0636] In some cases, the cell being contacted is a helper T cell, where contacting the helper T cell with a TMAPP of the present disclosure results in activation of the helper T cell. In some cases, activation of the helper T cell results in an increase in the activity and/or number of CD8⁺ cytotoxic T cells, e.g., CD8⁺ cytotoxic T cells that target and kill an autoreactive cell.

[0637] In some cases (e.g., where a TMAPP of the present disclosure comprises a cancer epitope), a TMAPP of the present disclosure activates a CD8⁺ T cell response, e.g., a CD8⁺ T cell response to a cancer cell.

### Methods of Detecting an Antigen-Specific T Cell

[0638] The present disclosure provides a method of detecting an antigen-specific T-cell. The methods comprise contacting a T cell with an APP of the present disclosure; and detecting binding of the APP to the T cell.

[0639] The present disclosure provides a method of detecting an antigen-specific T cell, the method comprising contacting a T cell with an APP of the present disclosure, wherein binding of the APP to the T cell indicates that the T cell is specific for the epitope present in the APP.

[0640] In some cases, the APP comprises a detectable label. Suitable detectable labels include, but are not limited to, a radioisotope, a fluorescent polypeptide, or an enzyme that generates a fluorescent product, and an enzyme that generates a colored product. Where the APP comprises a detectable label, binding of the APP to the T cell is detected by detecting the detectable label.

[0641] Suitable fluorescent proteins include, but are not limited to, green fluorescent protein (GFP) or variants thereof, blue fluorescent variant of GFP (BFP), cyan fluorescent variant of GFP (CFP), yellow fluorescent variant of GFP (YFP), enhanced GFP (EGFP), enhanced CFP (ECFP), enhanced YFP (EYFP), GFPS65T, Emerald, Topaz (TYFP), Venus, Citrine, mCitrine, GFPuv, destabilised EGFP (dEGFP), destabilised ECFP (dECFP), destabilised EYFP (dEYFP), mCFPm, Cerulean, T-Sapphire, CyPet, YPet, mKO, HcRed, t-HcRed, DsRed, DsRed2, DsRed-monomer, J-Red, dimer2, t-dimer2(12), mRFP1, pocilloporin, Renilla GFP, Monster GFP, paGFP, Kaede protein and kindling protein, Phycobiliproteins and Phycobiliprotein conjugates including B-Phycoerythrin, R-Phycoerythrin and Allophycocyanin. Other examples of fluorescent proteins include mHoneydew, mBanana, mOrange, dTomato, tdTomato, mTangerine, mStrawberry, mCherry, mGrape1, mRaspberry, mGrape2, mPlum (Shaner et al. (2005) Nat. Methods 2:905-909), and the like. Any of a variety of fluorescent and colored proteins from Anthozoan species, as described in, e.g., Matz et al. (1999) Nature Biotechnol. 17:969-973, is suitable for use.

[0642] Suitable enzymes include, but are not limited to, horse radish peroxidase (HRP), alkaline phosphatase (AP), beta-galactosidase (GAL), glucose-6-phosphate dehydrogenase, beta-N-acetylglucosaminidase, β-glucuronidase, invertase, Xanthine Oxidase, firefly luciferase, glucose oxidase (GO), and the like.

[0643] In some cases, binding of the APP to the T cell is detected using a detectably labeled antibody specific for the APP. An antibody specific for the APP can comprise a detectable label such as a radioisotope, a fluorescent polypeptide, or an enzyme that generates a fluorescent product, or an enzyme that generates a colored product.

[0644] In some cases, the T cell being detected is present in a sample comprising a plurality of T cells. For example, a T cell being detected can be present in a sample comprising from 10 to 10⁹ T cells, e.g., from 10 to 10², from 10² to 10⁴, from 10⁴ to 10⁶, from 10⁶ to 10⁷, from 10⁷ to 10⁸, or from 10⁸ to 10⁹, or more than 10⁹, T cells.

### Treatment Methods

[0645] The present disclosure provides treatment methods, the methods comprising administering to the individual an amount of a TMAPP of the present disclosure, or one or more nucleic acids or expression vectors encoding the TMAPP, effective to selectively modulate the activity of an epitope-specific T cell in an individual and to treat the individual. In some cases, a treatment method of the present disclosure comprises administering to an individual in need thereof one or more recombinant expression vectors comprising nucleotide sequences encoding a TMAPP of the present disclosure. In some cases, a treatment method of the present disclosure comprises administering to an individual in need thereof one or more mRNA molecules comprising nucleotide sequences encoding a TMAPP of the present disclosure. In some cases, a treatment method of the present disclosure comprises administering to an individual in need thereof a TMAPP of the present disclosure. Conditions that can be treated include autoimmune disorders other than T1D and/or celiac disease.

[0646] The present disclosure provides a method of selectively modulating the activity of an epitope-specific T cell in an individual, the method comprising administering to the individual an effective amount of a TMAPP of the present disclosure, or one or more nucleic acids (e.g., expression vectors; mRNA; etc.) comprising nucleotide sequences encoding the TMAPP, where the TMAPP selectively modulates the activity of the epitope-specific T cell in the individual. Selectively modulating the activity of an epitope-specific T cell can treat a disease or disorder in the individual. Thus, the present disclosure provides a treatment method comprising administering to an individual in need thereof an effective amount of a TMAPP of the present disclosure (e.g., a multimeric TMAPP of the present disclosure; or a single-chain TMAPP of the present disclosure). The disease or disorder is an autoimmune disease or disorder other than T1D or celiac disease.

[0647] In some cases, the immunomodulatory polypeptide is an inhibitory polypeptide, and a T TMAPP of the present disclosure inhibits activity of the epitope-specific T cell. In some cases, the epitope is a self-epitope, and a TMAPP of the present disclosure selectively inhibits the activity of a T cell specific for the self-epitope.

[0648] The present disclosure provides a method of treating an autoimmune disorder in an individual, the method comprising administering to the individual an effective amount of a TMAPP of the present disclosure, or one or more nucleic acids comprising nucleotide sequences encoding the TMAPP, where the TMAPP (e.g., a TMAPP of the present disclosure; or a single-chain TMAPP of the present disclosure) comprises a T-cell epitope that is a self epitope, and where the TMAPP comprises an inhibitory immunomodulatory polypeptide. In some cases, an “effective amount” of a TMAPP of the present disclosure is an amount that, when administered in one or more doses to an individual in need thereof, reduces the number self-reactive T cells by at least 10%, at least 15%, at least 20%, at least 25%, at least 30%, at least 40%, at least 50%, at least 60%, at least 70%, at least 80%, at least 90%, or at least 95%, compared to number of self-reactive T cells in the individual before administration of the TMAPP, or in the absence of administration with the TMAPP. In some cases, an “effective amount” of a TMAPP of the present disclosure is an amount that, when administered in one or more doses to an individual in need thereof, reduces production of Th2 cytokines in the individual. In some cases, an “effective amount” of a TMAPP of the present disclosure is an amount that, when administered in one or more doses to an individual in need thereof, ameliorates one or more symptoms associated with an autoimmune disease in the individual. In some instances, the TMAPP reduces the number of CD4⁺ self-reactive T cells, which in turn leads to a reduction in CD8⁺ self-reactive T cells. In some instances, the TMAPP increases the number of CD4⁺ Tregs, which in turn reduces the number of CD4⁺ self-reactive T cells and/or CD8⁺ T self-reactive T cells.

[0649] The present disclosure provides a method of treating an allergy in an individual, the method comprising administering to the individual an effective amount of a TMAPP of the present disclosure, or one or more nucleic acids comprising nucleotide sequences encoding the TMAPP, where the TMAPP (e.g., a TMAPP of the present disclosure; or a single-chain TMAPP of the present disclosure) comprises a T-cell epitope that is an allergen-associated peptide epitope, and where the TMAPP comprises an inhibitory immunomodulatory polypeptide. In some cases, an “effective amount” of a TMAPP of the present disclosure is an amount that, when administered in one or more doses to an individual in need thereof, reduces the number and/or activity of allergen-specific CD4⁺ T cells by at least 10%, at least 15%, at least 20%, at least 25%, at least 30%, at least 40%, at least 50%, at least 60%, at least 70%, at least 80%, at least 90%, or at least 95%, compared to number and/or activity of allergen-specific CD4⁺ T cells in the individual before administration of the TMAPP, or in the absence of administration with the TMAPP. In some cases, an “effective amount” of a TMAPP of the present disclosure is an amount that, when administered in one or more doses to an individual in need thereof, reduces the amount of cytokines produced by allergen-specific CD4⁺ T cells. In some cases, an “effective amount” of a TMAPP of the present disclosure is an amount that, when administered in one or more doses to an individual in need thereof, reduces level of IgE in the individual, compared to the level of IgE in the individual before administration of the TMAPP, or in the absence of administration with the TMAPP. In some cases, an “effective amount” of a TMAPP of the present disclosure is an amount that, when administered in one or more doses to an individual in need thereof, ameliorates one or more symptoms associated with an allergic disease in the individual.

[0650] An “allergen” is any substance that can cause an undesired (e.g., a Type 1 hypersensitive) immune response (i.e., allergic response or reaction) in a subject. Allergens include, but are not limited to, plant allergens (e.g., pollen, ragweed allergen), insect allergens, insect sting allergens (e.g., bee sting allergens), animal allergens (e.g., pet allergens, such as animal dander or cat Fel d 1 antigen), latex allergens, mold allergens, fungal allergens, cosmetic allergens, drug allergens, food allergens, dust, insect venom, viruses, bacteria, etc. Food allergens include, but are not limited to milk allergens, egg allergens, nut allergens (e.g., peanut or tree nut allergens, etc. (e.g., walnuts, cashews, etc.)), fish allergens, shellfish allergens, soy allergens, legume allergens, seed allergens and wheat allergens. Insect sting allergens include allergens that are or are associated with bee stings, wasp stings, hornet stings, yellow jacket stings, etc. Insect allergens also include house dust mite allergens (e.g., Der P1 antigen) and cockroach allergens. Drug allergens include allergens that are or are associated with antibiotics, non-steroidal ant-inflammatory drugs (NSAIDs), anesthetics, etc. Pollen allergens include grass allergens, tree allergens, weed allergens, flower allergens, etc.

[0651] Non-limiting examples of allergens include, but are not limited to, grass pollen allergens such as Phl p 1, Phl p 5, Phl p 6, Poa p 1, Poa p 5, Dac g 1, Fes p 1, Lol p 1 and Lol p 5; dust mite allergens such as Der f 1, Der f 2, Der p 1 and Der p 2; venom allergens such as Api m 1, Api m 2, Ves v 1, Ves v 2, Ves v 5, Dol m 1, Dol m 2, Dol m 5, Dol a 5, Pol a 1, Pol a 2, and Pol a 5; weed allergens such as Amb a 1, Amb a 2, Par j 1, Par o 1 and Par m 1; birch allergens such as Bet v 1; Japanese cedar allergens such as Cry j 1 and Cry j 2; cockroach allergens such as Per a 1; olive pollen allergens such as Ole e 1; cat allergens such as Fel d 1; dog allergens such as Can f 1 and Can f 2; horse allergens such as Equ c 1 and Equ c 2; mugworth allergens such as Art v 1, Art v 2, Art v 3; mold allergens such as Alt a 1, Alt a 3, Alt a 4, Alt a 5, Alt a 6, Cla h 1, Cla h 2 and Cla h 6; and fire ant allergens such as Sol i 2, Sol i 3 and Sol i 4.

[0652] As noted above, in some cases, in carrying out a subject treatment method, a TMAPP of the present disclosure is administered to an individual in need thereof, as the polypeptide per se. In other instances, in carrying out a subject treatment method, one or more nucleic acids comprising nucleotide sequences encoding a TMAPP is/are administering to an individual in need thereof. Thus, in other instances, one or more nucleic acids of the present disclosure, e.g., one or more recombinant expression vectors of the present disclosure, is/are administered to an individual in need thereof.

### Formulations

[0653] Suitable formulations are described above, where suitable formulations include a pharmaceutically acceptable excipient. In some cases, a suitable formulation comprises: a) a TMAPP of the present disclosure; and b) a pharmaceutically acceptable excipient. In some cases, a suitable formulation comprises: a) a nucleic acid comprising a nucleotide sequence encoding a TMAPP of the present disclosure; and b) a pharmaceutically acceptable excipient; in some instances, the nucleic acid is an mRNA. In some cases, a suitable formulation comprises: a) a first nucleic acid comprising a nucleotide sequence encoding the first polypeptide of a TMAPP of the present disclosure; b) a second nucleic acid comprising a nucleotide sequence encoding the second polypeptide of a TMAPP of the present disclosure; and c) a pharmaceutically acceptable excipient. In some cases, a suitable formulation comprises: a) a recombinant expression vector comprising a nucleotide sequence encoding a TMAPP of the present disclosure; and b) a pharmaceutically acceptable excipient. In some cases, a suitable formulation comprises: a) a first recombinant expression vector comprising a nucleotide sequence encoding the first polypeptide of a TMAPP of the present disclosure; b) a second recombinant expression vector comprising a nucleotide sequence encoding the second polypeptide of a TMAPP of the present disclosure; and c) a pharmaceutically acceptable excipient.

[0654] Suitable pharmaceutically acceptable excipients are described above.

### Dosages

[0655] A suitable dosage can be determined by an attending physician or other qualified medical personnel, based on various clinical factors. As is well known in the medical arts, dosages for any one patient depend upon many factors, including the patient's size, body surface area, age, the particular polypeptide or nucleic acid to be administered, sex of the patient, time, and route of administration, general health, and other drugs being administered concurrently. A multimeric polypeptide or a single-chain polypeptide of the present disclosure (e.g., a multimeric TMAPP or a single-chain TMAPP) may be administered in amounts between 1 ng/kg body weight and 20 mg/kg body weight per dose, e.g. between 0.1 mg/kg body weight to 10 mg/kg body weight, e.g. between 0.5 mg/kg body weight to 5 mg/kg body weight; however, doses below or above this exemplary range are envisioned, especially considering the aforementioned factors. If the regimen is a continuous infusion, it can also be in the range of 1 μg to 10 mg per kilogram of body weight per minute. A TMAPP of the present disclosure can be administered in an amount of from about 1 mg/kg body weight to 50 mg/kg body weight, e.g., from about 1 mg/kg body weight to about 5 mg/kg body weight, from about 5 mg/kg body weight to about 10 mg/kg body weight, from about 10 mg/kg body weight to about 15 mg/kg body weight, from about 15 mg/kg body weight to about 20 mg/kg body weight, from about 20 mg/kg body weight to about 25 mg/kg body weight, from about 25 mg/kg body weight to about 30 mg/kg body weight, from about 30 mg/kg body weight to about 35 mg/kg body weight, from about 35 mg/kg body weight to about 40 mg/kg body weight, or from about 40 mg/kg body weight to about 50 mg/kg body weight.

[0656] In some cases, a suitable dose of a TMAPP of the present disclosure is from 0.01 μg to 100 g per kg of body weight, from 0.1 μg to 10 g per kg of body weight, from 1 μg to 1 g per kg of body weight, from 10 μg to 100 mg per kg of body weight, from 100 μg to 10 mg per kg of body weight, or from 100 μg to 1 mg per kg of body weight. Persons of ordinary skill in the art can easily estimate repetition rates for dosing based on measured residence times and concentrations of the administered agent in bodily fluids or tissues. Following successful treatment, it may be desirable to have the patient undergo maintenance therapy to prevent the recurrence of the disease state, wherein a multimeric polypeptide or a single-chain polypeptide of the present disclosure (e.g., a multimeric TMAPP or a single-chain TMAPP) is administered in maintenance doses, ranging from 0.01 μg to 100 g per kg of body weight, from 0.1 μg to 10 g per kg of body weight, from 1 μg to 1 g per kg of body weight, from 10 μg to 100 mg per kg of body weight, from 100 μg to 10 mg per kg of body weight, or from 100 μg to 1 mg per kg of body weight.

[0657] Those of skill will readily appreciate that dose levels can vary as a function of the specific multimeric polypeptide or single-chain polypeptide (multimeric TMAPP or single-chain TMAPP), the severity of the symptoms and the susceptibility of the subject to side effects. Preferred dosages for a given compound are readily determinable by those of skill in the art by a variety of means.

[0658] In some cases, multiple doses of a TMAPP of the present disclosure, a nucleic acid of the present disclosure, or a recombinant expression vector of the present disclosure are administered. The frequency of administration of a TMAPP of the present disclosure, a nucleic acid of the present disclosure, or a recombinant expression vector of the present disclosure can vary depending on any of a variety of factors, e.g., severity of the symptoms, etc. For example, in some cases, a TMAPP of the present disclosure, a nucleic acid of the present disclosure, or a recombinant expression vector of the present disclosure is administered once per month, twice per month, three times per month, every other week (qow), once per week (qw), twice per week (biw), three times per week (tiw), four times per week, five times per week, six times per week, every other day (qod), daily (qd), twice a day (qid), or three times a day (tid).

[0659] The duration of administration of a TMAPP of the present disclosure, a nucleic acid of the present disclosure, or a recombinant expression vector of the present disclosure, e.g., the period of time over which a TMAPP of the present disclosure, a nucleic acid of the present disclosure, or a recombinant expression vector of the present disclosure is administered, can vary, depending on any of a variety of factors, e.g., patient response, etc. For example, a TMAPP of the present disclosure, a nucleic acid of the present disclosure, or a recombinant expression vector of the present disclosure can be administered over a period of time ranging from about one day to about one week, from about two weeks to about four weeks, from about one month to about two months, from about two months to about four months, from about four months to about six months, from about six months to about eight months, from about eight months to about 1 year, from about 1 year to about 2 years, or from about 2 years to about 4 years, or more.

### Routes of Administration

[0660] An active agent (a TMAPP of the present disclosure, a nucleic acid of the present disclosure, or a recombinant expression vector of the present disclosure) is administered to an individual using any available method and route suitable for drug delivery, including in vivo and ex vivo methods, as well as systemic and localized routes of administration.

[0661] Conventional and pharmaceutically acceptable routes of administration include intratumoral, peritumoral, intramuscular, intratracheal, intralymphatic, intracranial, subcutaneous, intradermal, topical application, intravenous, intraarterial, rectal, nasal, oral, and other enteral and parenteral routes of administration. Routes of administration may be combined, if desired, or adjusted depending upon the TMAPP and/or the desired effect. A TMAPP of the present disclosure, or a nucleic acid or recombinant expression vector of the present disclosure, can be administered in a single dose or in multiple doses.

[0662] In some cases, a TMAPP of the present disclosure, a nucleic acid of the present disclosure, or a recombinant expression vector of the present disclosure is administered intravenously. In some cases, a TMAPP of the present disclosure, a nucleic acid of the present disclosure, or a recombinant expression vector of the present disclosure is administered intramuscularly. In some cases, a TMAPP of the present disclosure, a nucleic acid of the present disclosure, or a recombinant expression vector of the present disclosure is administered intralymphatically. In some cases, a TMAPP of the present disclosure, a nucleic acid of the present disclosure, or a recombinant expression vector of the present disclosure is administered locally. In some cases, a TMAPP of the present disclosure, a nucleic acid of the present disclosure, or a recombinant expression vector of the present disclosure is administered intratumorally. In some cases, a TMAPP of the present disclosure, a nucleic acid of the present disclosure, or a recombinant expression vector of the present disclosure is administered peritumorally. In some cases, a TMAPP of the present disclosure, a nucleic acid of the present disclosure, or a recombinant expression vector of the present disclosure is administered intracranially. In some cases, a TMAPP of the present disclosure, a nucleic acid of the present disclosure, or a recombinant expression vector of the present disclosure is administered subcutaneously.

[0663] In some cases, a TMAPP of the present disclosure is administered intravenously. In some cases, a TMAPP of the present disclosure is administered intramuscularly. In some cases, a TMAPP of the present disclosure is administered locally. In some cases, a TMAPP of the present disclosure is administered intratumorally. In some cases, a TMAPP of the present disclosure is administered peritumorally. In some cases, a TMAPP of the present disclosure is administered intracranially. In some cases, a TMAPP of the present disclosure is administered subcutaneously. In some cases, a TMAPP of the present disclosure is administered intralymphatically.

[0664] A TMAPP of the present disclosure, a nucleic acid of the present disclosure, or a recombinant expression vector of the present disclosure can be administered to a host using any available conventional methods and routes suitable for delivery of conventional drugs, including systemic or localized routes. In general, routes of administration contemplated for use in a method of the present disclosure include, but are not necessarily limited to, enteral, parenteral, and inhalational routes.

[0665] Parenteral routes of administration other than inhalation administration include, but are not necessarily limited to, topical, transdermal, subcutaneous, intramuscular, intraorbital, intracapsular, intraspinal, intrasternal, intratumoral, intralymphatic, peritumoral, and intravenous routes, i.e., any route of administration other than through the alimentary canal. Parenteral administration can be carried to effect systemic or local delivery of a TMAPP of the present disclosure, a nucleic acid of the present disclosure, or a recombinant expression vector of the present disclosure. Where systemic delivery is desired, administration typically involves invasive or systemically absorbed topical or mucosal administration of pharmaceutical preparations.

### Subjects Suitable for Treatment

[0666] Subjects suitable for treatment with a method of the present disclosure include individuals who have an autoimmune disease, including individuals who have been diagnosed as having an autoimmune disease, and individuals who have been treated for an autoimmune disease but who failed to respond to the treatment. Autoimmune diseases that can be treated with a method of the present disclosure include, but are not limited to, Addison's disease, alopecia areata, ankylosing spondylitis, autoimmune encephalomyelitis, autoimmune hemolytic anemia, autoimmune hepatitis, autoimmune-associated infertility, autoimmune thrombocytopenic purpura, bullous pemphigoid, Crohn's disease, Goodpasture's syndrome, glomerulonephritis (e.g., crescentic glomerulonephritis, proliferative glomerulonephritis), Grave's disease, Hashimoto's thyroiditis, mixed connective tissue disease, multiple sclerosis, myasthenia gravis (MG), pemphigus (e.g., pemphigus vulgaris), pernicious anemia, polymyositis, psoriasis, psoriatic arthritis, rheumatoid arthritis, scleroderma, Sjögren's syndrome, systemic lupus erythematosus (SLE), vasculitis, and vitiligo.

### Methods of Selectively Delivering a Costimulatory Polypeptide

[0667] The present disclosure provides a method of delivering a costimulatory polypeptide such as PD-L1, or a reduced-affinity variant of a naturally occurring costimulatory polypeptide such as a PD-L1 variant disclosed herein, to a selected T cell or a selected T cell population, e.g., in a manner such that a TCR specific for a given epitope is targeted. The present disclosure provides a method of delivering a costimulatory polypeptide such as PD-L1, or a reduced-affinity variant of a naturally occurring costimulatory polypeptide such as a PD-L1 variant disclosed herein, selectively to a target T cell bearing a TCR specific for the epitope present in a TMAPP of the present disclosure. The method comprises contacting a population of T cells with a TMAPP of the present disclosure. The population of T cells can be a mixed population that comprises: i) the target T cell; and ii) non-target T cells that are not specific for the epitope (e.g., T cells that are specific for an epitope(s) other than the epitope to which the epitope-specific T cell binds). The epitope-specific T cell is specific for the epitope-presenting peptide present in the TMAPP, and binds to the peptide HLA complex or peptide MHC complex provided by the TMAPP. Contacting the population of T cells with the TMAPP delivers the costimulatory polypeptide (e.g., PD-L1 or a reduced-affinity variant of PD-L1) present in the TMAPP selectively to the T cell(s) that are specific for the epitope present in the TMAPP.

[0668] Thus, the present disclosure provides a method of delivering a costimulatory polypeptide such as PD-L1, or a reduced-affinity variant of a naturally occurring costimulatory polypeptide such as a PD-L1 variant disclosed herein, or a combination of both, selectively to a target T cell, the method comprising contacting a mixed population of T cells with a TMAPP of the present disclosure. The mixed population of T cells comprises the target T cell and non-target T cells. The target T cell is specific for the epitope present within the TMAPP. Contacting the mixed population of T cells with a TMAPP of the present disclosure delivers the costimulatory polypeptide(s) present within the TMAPP to the target T cell.

[0669] For example, a TMAPP of the present disclosure is contacted with a population of T cells comprising: i) a target T cell(s) that is specific for the epitope present in the TMAPP; and ii) a non-target T cell(s), e.g., a T cell(s) that is specific for a second epitope(s) that is not the epitope present in the TMAPP. Contacting the population results in selective delivery of the costimulatory polypeptide(s) (e.g., naturally-occurring costimulatory polypeptide (e.g., naturally occurring PD-L1) or reduced-affinity variant of a naturally occurring costimulatory polypeptide (e.g., a PD-L1 variant disclosed herein)), which is present in the TMAPP, to the target T cell. Thus, e.g., less than 50%, less than 40%, less than 30%, less than 25%, less than 20%, less than 15%, less than 10%, less than 5%, or less than 4%, 3%, 2% or 1%, of the non-target T cells bind the TMAPP and, as a result, the costimulatory polypeptide (e.g., PD-L1 or PD-L1 variant) is not delivered to the non-target T cells.

[0670] In some cases, the population of T cells is in vitro. In some cases, the population of T cells is in vitro, and a biological response (e.g., T cell activation and/or expansion and/or phenotypic differentiation) of the target T cell population to the TMAPP of the present disclosure is elicited in the context of an in vitro culture. For example, a mixed population of T cells can be obtained from an individual, and can be contacted with the TMAPP in vitro. Such contacting can comprise single or multiple exposures of the population of T cells to a defined dose(s) and/or exposure schedule(s). In some cases, said contacting results in selectively binding/activating and/or expanding target T cells within the population of T cells, and results in generation of a population of activated and/or expanded target T cells. As an example, a mixed population of T cells can be peripheral blood mononuclear cells (PBMC). For example, PBMC from a patient can be obtained by standard blood drawing and PBMC enrichment techniques before being exposed to 0.1-1000 nM of a TMAPP of the present disclosure under standard lymphocyte culture conditions. At time points before, during, and after exposure of the mixed T cell population at a defined dose and schedule, the abundance of target T cells in the in vitro culture can be monitored by specific peptide-MHC multimers and/or phenotypic markers and/or functional activity (e.g. cytokine ELISpot assays). In some cases, upon achieving an optimal abundance and/or phenotype of antigen specific cells in vitro, all or a portion of the population of activated and/or expanded target T cells is administered to the individual (the individual from whom the mixed population of T cells was obtained).

[0671] In some cases, the population of T cells is in vitro. For example, a mixed population of T cells is obtained from an individual, and is contacted with a TMAPP of the present disclosure in vitro. Such contacting, which can comprise single or multiple exposures of the T cells to a defined dose(s) and/or exposure schedule(s) in the context of in vitro cell culture, can be used to determine whether the mixed population of T cells includes T cells that are specific for the epitope presented by the TMAPP. The presence of T cells that are specific for the epitope of the TMAPP can be determined by assaying a sample comprising a mixed population of T cells, which population of T cells comprises T cells that are not specific for the epitope (non-target T cells) and may comprise T cells that are specific for the epitope (target T cells). Known assays can be used to detect activation and/or proliferation of the target T cells, thereby providing an ex vivo assay that can determine whether a particular TMAPP possesses an epitope that binds to T cells present in the individual and thus whether the TMAPP has potential use as a therapeutic composition for that individual. Suitable known assays for detection of activation and/or proliferation of target T cells include, e.g., flow cytometric characterization of T cell phenotype and/or antigen specificity and/or proliferation. Such an assay to detect the presence of epitope-specific T cells, e.g., a companion diagnostic, can further include additional assays (e.g. effector cytokine ELISpot assays) and/or appropriate controls (e.g. antigen-specific and antigen-nonspecific multimeric peptide-HLA staining reagents) to determine whether the TMAPP is selectively binding/activating and/or expanding the target T cell. Thus, for example, the present disclosure provides a method of detecting, in a mixed population of T cells obtained from an individual, the presence of a target T cell that binds an epitope of interest, the method comprising: a) contacting in vitro the mixed population of T cells with a TMAPP of the present disclosure, wherein the multimeric polypeptide comprises the epitope of interest; and b) detecting activation and/or proliferation of T cells in response to said contacting, wherein activated and/or proliferated T cells indicates the presence of the target T cell. Alternatively, and/or in addition, if activation and/or expansion (proliferation) of the desired T cell population is obtained using the TMAPP, then all or a portion of the population of T cells comprising the activated/expanded T cells can be administered back to the individual as a therapy.

[0672] In some instances, the population of T cells is in vivo in an individual. In such instances, a method of the present disclosure for selectively delivering a costimulatory polypeptide (e.g., PD-L1 or a reduced-affinity PD-L1) to an epitope-specific T cell comprises administering the TMAPP to the individual.

[0673] The epitope-specific T cell to which a costimulatory polypeptide (e.g., IL-2 or a reduced-affinity PD-L1) is being selectively delivered is also referred to herein as a “target T cell.” In some cases, the target T cell is a regulatory T cell (Treg). In some cases, the Treg inhibits or suppresses activity of an autoreactive T cell.

### EXAMPLES OF NON-LIMITING ASPECTS OF THE DISCLOSURE

[0674] Aspects, including embodiments, of the present subject matter described above may be beneficial alone or in combination, with one or more other aspects or embodiments.

### Aspects Set A

[0675] Aspect 1. A multimeric antigen-presenting polypeptide comprising: a) a first polypeptide comprising: i) a first major histocompatibility complex (MHC) Class II polypeptide; and b) a second polypeptide comprising: i) a second MHC Class II polypeptide; and ii) optionally an immunoglobulin (Ig) Fc polypeptide or a non-Ig scaffold, wherein the multimeric polypeptide comprises an epitope capable of being bound by a T-cell receptor (TCR), wherein the epitope is: A) at the N-terminus of the first polypeptide; or B) at the N-terminus of the second polypeptide.

[0676] Aspect 2. The multimeric antigen-presenting polypeptide of aspect 1, wherein: a) the first polypeptide comprises, in order from N-terminus to C-terminus: i) the epitope; ii) an MHC Class II α1 polypeptide; and iii) an MHC Class II α2 polypeptide; and b) the second polypeptide comprises, in order from N-terminus to C-terminus: i) an MHC Class II β1 polypeptide; and ii) an MHC Class II β2 polypeptide.

[0677] Aspect 3. The multimeric antigen-presenting polypeptide of aspect 1, wherein: a) the first polypeptide comprises, in order from N-terminus to C-terminus: i) the epitope; ii) an MHC Class II β1 polypeptide; and iii) an MHC Class II β2 polypeptide; and b) the second polypeptide comprises, in order from N-terminus to C-terminus: i) an MHC Class II α1 polypeptide; and ii) an MHC Class II α2 polypeptide.

[0678] Aspect 4. The multimeric antigen-presenting polypeptide of aspect 1, wherein: a) the first polypeptide comprises, in order from N-terminus to C-terminus: i) the epitope; ii) an MHC Class II β1 polypeptide; iii) an MHC Class II α1 polypeptide; and iv) an MHC Class II α2 polypeptide; and b) the second polypeptide comprises an MHC Class II β2 polypeptide.

[0679] Aspect 5. The multimeric antigen-presenting polypeptide of any one of aspects 1-4, wherein the first polypeptide comprises an Ig Fc polypeptide at the C-terminus.

[0680] Aspect 6. The multimeric antigen-presenting polypeptide of any one of aspects 1-5, wherein: a) the first polypeptide comprises a first dimerization polypeptide; and b) the second polypeptide comprises a second dimerization polypeptide.

[0681] Aspect 7. The multimeric antigen-presenting polypeptide of aspect 6, wherein the first and the second dimerization polypeptides are leucine-zipper polypeptides, collagen dimerization polypeptides, or coiled-coil polypeptides.

[0682] Aspect 8. The multimeric antigen-presenting polypeptide of any one of aspects 2-6, wherein the MHC Class II α1 polypeptide comprises an amino acid sequence having at least 95% amino acid sequence identity to an MHC Class II α1 polypeptide depicted in any one of FIGS. 6, 11, 13, 15, 17, and 18.

[0683] Aspect 9. The multimeric antigen-presenting polypeptide of any one of aspects 2-6, wherein the MHC Class II α2 polypeptide comprises an amino acid sequence having at least 95% amino acid sequence identity to an MHC Class II α2 polypeptide depicted in any one of FIGS. 6, 11, 13, 15, 17, and 18.

[0684] Aspect 10. The multimeric antigen-presenting polypeptide of any one of aspects 2-6, wherein the MHC Class II β1 polypeptide comprises an amino acid sequence having at least 95% amino acid sequence identity to an MHC Class II β1 polypeptide depicted in any one of FIG. 7A-7J, FIG. 8A-8B, FIG. 9, FIG. 10, FIG. 12, FIG. 14, FIG. 16, FIG. 19A-19B, and FIG. 20A-20B.

[0685] Aspect 11. The multimeric antigen-presenting polypeptide of any one of aspects 2-6, wherein the MHC Class II β2 polypeptide comprises an amino acid sequence having at least 95% amino acid sequence identity to an MHC Class II β2 polypeptide depicted in any one of FIG. 7A-7J, FIG. 8A-8B, FIG. 9, FIG. 10, FIG. 12, FIG. 14, FIG. 16, FIG. 19A-19B, and FIG. 20A-20B.

[0686] Aspect 12. A single-chain antigen-presenting polypeptide comprising: i) a major histocompatibility complex (MHC) Class II α1 polypeptide; ii) a Class II MHC α2 polypeptide; iii) a Class II MHC β1 polypeptide; iv) a Class II MHC β2 polypeptide; v) an epitope capable of being bound by a T-cell receptor (TCR); and vi) optionally an immunoglobulin (Ig) Fc polypeptide or a non-Ig scaffold.

[0687] Aspect 13. The single-chain antigen-presenting polypeptide of aspect 12, wherein the polypeptide comprises, in order from N-terminus to C-terminus: i) the epitope; ii) the Class II MHC polypeptide; iii) the Class II MHC α1 polypeptide; iv) the Class II MHC α2 polypeptide; and v) the Class II MHC β2 polypeptide.

[0688] Aspect 14. The single-chain antigen-presenting polypeptide of aspect 12, wherein the polypeptide comprises, in order from N-terminus to C-terminus: i) the epitope; ii) the Class II MHC β1 polypeptide; iii) the Class II MHC β2 polypeptide; iv) the Class II MHC α1 polypeptide; and v) the Class II MHC α2 polypeptide.

[0689] Aspect 15. The single-chain antigen-presenting polypeptide of aspect 13 or aspect 14, comprising an immunoglobulin Fc polypeptide at the C-terminus.

[0690] Aspect 16. The single-chain antigen-presenting polypeptide of aspect 13, comprising a linker.

[0691] Aspect 17. The single-chain antigen-presenting polypeptide of aspect 16, wherein the linker is between the epitope and the Class II MHC polypeptide.

[0692] Aspect 18. The single-chain antigen-presenting polypeptide of aspect 14, comprising a linker.

[0693] Aspect 19. The single-chain antigen-presenting polypeptide of aspect 18, wherein the linker is between the epitope and the Class II MHC polypeptide.

[0694] Aspect 20. The single-chain antigen-presenting polypeptide of any one of aspects 12-19, wherein the MHC Class II α1 polypeptide comprises an amino acid sequence having at least 95% amino acid sequence identity to an MHC Class II α1 polypeptide depicted in any one of FIGS. 6, 11, 13, 15, 17, and 18.

[0695] Aspect 21. The single-chain antigen-presenting polypeptide of any one of aspects 12-19, wherein the MHC Class II α2 polypeptide comprises an amino acid sequence having at least 95% amino acid sequence identity to an MHC Class II α2 polypeptide depicted in any one of FIGS. 6, 11, 13, 15, 17, and 18.

[0696] Aspect 22. The single-chain antigen-presenting polypeptide of any one of aspects 12-19, wherein the MHC Class II β1 polypeptide comprises an amino acid sequence having at least 95% amino acid sequence identity to an MHC Class II β1 polypeptide depicted in any one of FIG. 7A-7J, FIG. 8A-8B, FIG. 9, FIG. 10, FIG. 12, FIG. 14, FIG. 16, FIG. 19A-19B, and FIG. 20A-20B.

[0697] Aspect 23. The single-chain antigen-presenting polypeptide of any one of aspects 12-19, wherein the MHC Class II β2 polypeptide comprises an amino acid sequence having at least 95% amino acid sequence identity to an MHC Class II β2 polypeptide depicted in any one of FIG. 7A-7J, FIG. 8A-8B, FIG. 9, FIG. 10, FIG. 12, FIG. 14, FIG. 16, FIG. 19A-19B, and FIG. 20A-20B.

[0698] Aspect 24. A multimeric T-cell modulatory antigen-presenting polypeptide comprising: a) a first polypeptide comprising: i) an epitope capable of being bound by a T-cell receptor (TCR); ii) a first major histocompatibility complex (MHC) Class II polypeptide; and b) a second polypeptide comprising: i) a second MHC Class II polypeptide; and wherein one or both polypeptides of the multimeric polypeptide comprises one or more immunomodulatory polypeptides, and wherein one or both polypeptides of the multimeric polypeptide optionally comprise an immunoglobulin (Ig) Fc polypeptide or a non-Ig scaffold.

[0699] Aspect 25. The multimeric T-cell modulatory antigen-presenting polypeptide of aspect 24, wherein: a) the first polypeptide comprises, in order from N-terminus to C-terminus: i) the epitope; ii) an MHC Class II β1 polypeptide; iii) an MHC Class II β2 polypeptide; and iv) an immunomodulatory domain; and b) the second polypeptide comprises, in order from N-terminus to C-terminus: i) an MHC Class II α1 polypeptide; ii) an MHC Class II α2 polypeptide.

[0700] Aspect 26. The multimeric T-cell modulatory antigen-presenting polypeptide of aspect 24, wherein: a) the first polypeptide comprises, in order from N-terminus to C-terminus: i) the epitope; ii) an MHC Class II β1 polypeptide; iii) an MHC Class II β2 polypeptide; and iv) an immunomodulatory domain; and b) the second polypeptide comprises, in order from N-terminus to C-terminus: i) an MHC Class II α1 polypeptide; ii) an MHC Class II α2 polypeptide; and iii) an Ig Fc polypeptide.

[0701] Aspect 27. The multimeric T-cell modulatory antigen-presenting polypeptide of aspect 24, wherein: a) the first polypeptide comprises, in order from N-terminus to C-terminus: i) the epitope; ii) an MHC Class II β1 polypeptide; iii) an MHC Class II β2 polypeptide; iv) an immunomodulatory domain; and v) a first dimerization polypeptide; and b) the second polypeptide comprises, in order from N-terminus to C-terminus: i) an MHC Class II α1 polypeptide; ii) an MHC Class II α2 polypeptide; and iii) a second dimerization polypeptide.

[0702] Aspect 28. The multimeric T-cell modulatory antigen-presenting polypeptide of aspect 24, wherein: a) the first polypeptide comprises, in order from N-terminus to C-terminus: i) the epitope; ii) an MHC Class II β1 polypeptide; iii) an MHC Class II β2 polypeptide; and b) the second polypeptide comprises, in order from N-terminus to C-terminus: i) an immunomodulatory domain; ii) an MHC Class II α1 polypeptide; and iii) an MHC Class II α2 polypeptide.

[0703] Aspect 29. The multimeric T-cell modulatory antigen-presenting polypeptide of aspect 24, wherein: a) the first polypeptide comprises, in order from N-terminus to C-terminus: i) the epitope; ii) an MHC Class II β1 polypeptide; iii) an MHC Class II β2 polypeptide; and b) the second polypeptide comprises, in order from N-terminus to C-terminus: i) an immunomodulatory domain; ii) an MHC Class II α1 polypeptide; iii) an MHC Class II α2 polypeptide; and iv) an Ig Fc polypeptide.

[0704] Aspect 30. The multimeric T-cell modulatory antigen-presenting polypeptide of aspect 24, wherein: a) the first polypeptide comprises, in order from N-terminus to C-terminus: i) the epitope; ii) an MHC Class II β1 polypeptide; iii) an MHC Class II β2 polypeptide; and iv) a first dimerization polypeptide; and b) the second polypeptide comprises, in order from N-terminus to C-terminus: i) an immunomodulatory domain; ii) an MHC Class II α1 polypeptide; iii) an MHC Class II α2 polypeptide; and iv) a second dimerization polypeptide.

[0705] Aspect 31. The multimeric T-cell modulatory antigen-presenting polypeptide of aspect 24, wherein: a) the first polypeptide comprises, in order from N-terminus to C-terminus: i) the epitope; ii) an MHC Class II β1 polypeptide; iii) an MHC Class II α1 polypeptide; iv) an MHC Class II α2 polypeptide; and b) the second polypeptide comprises, in order from N-terminus to C-terminus: i) an immunomodulatory domain; and ii) an MHC Class II β2 polypeptide.

[0706] Aspect 32. The multimeric T-cell modulatory antigen-presenting polypeptide of aspect 24, wherein: a) the first polypeptide comprises, in order from N-terminus to C-terminus: i) the epitope; ii) an MHC Class II β1 polypeptide; iii) an MHC Class II α1 polypeptide; iv) an MHC Class II α2 polypeptide; and b) the second polypeptide comprises, in order from N-terminus to C-terminus: i) an immunomodulatory domain; ii) an MHC Class II β2 polypeptide; and iii) an Ig Fc polypeptide.

[0707] Aspect 33. The multimeric T-cell modulatory antigen-presenting polypeptide of aspect 24, wherein: a) the first polypeptide comprises, in order from N-terminus to C-terminus: i) the epitope; ii) an MHC Class II β1 polypeptide; iii) an MHC Class II α1 polypeptide; iv) an MHC Class II α2 polypeptide; and v) a first dimerization polypeptide; and b) the second polypeptide comprises, in order from N-terminus to C-terminus: i) an immunomodulatory domain; ii) an MHC Class II β2 polypeptide; and iii) a second dimerization polypeptide.

[0708] Aspect 34. The multimeric T-cell modulatory antigen-presenting polypeptide of any one of aspects 24-33, comprising a linker.

[0709] Aspect 35. The multimeric T-cell modulatory antigen-presenting polypeptide of any one of aspects 24-33, wherein the MHC Class II α1 polypeptide comprises an amino acid sequence having at least 95% amino acid sequence identity to an MHC Class II α1 polypeptide depicted in any one of FIGS. 6, 11, 13, 15, 17, and 18.

[0710] Aspect 36. The multimeric T-cell modulatory antigen-presenting polypeptide of any one of aspects 24-33, wherein the MHC Class II α2 polypeptide comprises an amino acid sequence having at least 95% amino acid sequence identity to an MHC Class II α2 polypeptide depicted in any one of FIGS. 6, 11, 13, 15, 17, and 18.

[0711] Aspect 37. The multimeric T-cell modulatory antigen-presenting polypeptide of any one of aspects 24-33, wherein the MHC Class II β1 polypeptide comprises an amino acid sequence having at least 95% amino acid sequence identity to an MHC Class II β1 polypeptide depicted in any one of FIG. 7A-7J, FIG. 8A-8B, FIG. 9, FIG. 10, FIG. 12, FIG. 14, FIG. 16, FIG. 19A-19B, and FIG. 20A-20B.

[0712] Aspect 38. The multimeric T-cell modulatory antigen-presenting polypeptide of any one of aspects 24-33, wherein the MHC Class II β2 polypeptide comprises an amino acid sequence having at least 95% amino acid sequence identity to an MHC Class II β2 polypeptide depicted in any one of FIG. 7A-7J, FIG. 8A-8B, FIG. 9, FIG. 10, FIG. 12, FIG. 14, FIG. 16, FIG. 19A-19B, and FIG. 20A-20B.

[0713] Aspect 39. The multimeric T-cell modulatory antigen-presenting polypeptide of any one of aspects 24-38, wherein the immunomodulatory polypeptide comprises the amino acid sequence of a naturally-occurring immunomodulatory polypeptide.

[0714] Aspect 40. The multimeric T-cell modulatory antigen-presenting polypeptide of aspect 39, wherein the immunomodulatory polypeptide is selected from the group consisting of IL-2, 4-1BBL, PD-L1, CD80, CD86, B7-1, ICOS-L, OX-40L, FasL, TGFβ, JAG1, and PD-L2.

[0715] Aspect 41. The multimeric T-cell modulatory antigen-presenting polypeptide of any one of aspects 24-38, wherein the immunomodulatory polypeptide is a variant immunomodulatory polypeptide that comprises an amino acid sequence having from 1 to 10 amino acid substitutions compared to the amino acid sequence of a naturally-occurring immunomodulatory polypeptide, wherein the variant immunomodulatory polypeptide has reduced affinity for a co-immunomodulatory polypeptide, compared to the affinity of the naturally-occurring immunomodulatory polypeptide for the co-immunomodulatory polypeptide.

[0716] Aspect 42. The multimeric T-cell modulatory antigen-presenting polypeptide of aspect 41, wherein the variant immunomodulatory polypeptide is a variant 4-1BBL polypeptide.

[0717] Aspect 43. The multimeric T-cell modulatory antigen-presenting polypeptide of aspect 41, wherein the variant immunomodulatory polypeptide is a variant CD80 polypeptide.

[0718] Aspect 44. The multimeric T-cell modulatory antigen-presenting polypeptide of aspect 41, wherein the variant immunomodulatory polypeptide is a variant IL-2 polypeptide.

[0719] Aspect 45. The multimeric T-cell modulatory antigen-presenting polypeptide of aspect 41, wherein the variant immunomodulatory polypeptide is a variant CD86 polypeptide.

[0720] Aspect 46. The multimeric T-cell modulatory antigen-presenting polypeptide of aspect 41, wherein the variant immunomodulatory polypeptide is a variant PD-L1 polypeptide.

[0721] Aspect 47. The multimeric T-cell modulatory antigen-presenting polypeptide of any one of aspects 24-46, wherein the multimeric polypeptide comprises two immunomodulatory polypeptides.

[0722] Aspect 48. The multimeric T-cell modulatory antigen-presenting polypeptide of aspect 47, wherein the two immunomodulatory polypeptides are on the same polypeptide chain.

[0723] Aspect 49. The multimeric T-cell modulatory antigen-presenting polypeptide of aspect 47, wherein the two immunomodulatory polypeptides are on separate polypeptide chains.

[0724] Aspect 50. The multimeric T-cell modulatory antigen-presenting polypeptide of any one of aspects 47-49, wherein the two immunomodulatory polypeptides comprise the same amino acid sequence.

[0725] Aspect 51. The multimeric T-cell modulatory antigen-presenting polypeptide of any one of aspects 24-50, wherein the multimeric polypeptide comprises a peptide linker between one or more of: a) the epitope and the MHC polypeptide; b) any two adjacent MHC polypeptides; c) the MHC polypeptide and the Fc polypeptide; and d) two adjacent immunomodulatory polypeptides.

[0726] Aspect 52. The multimeric T-cell modulatory antigen-presenting polypeptide of aspect 51, wherein the linker has a length of from 20 amino acids to 40 amino acids.

[0727] Aspect 53. The multimeric T-cell modulatory antigen-presenting polypeptide of 51 or 52, wherein the linker is a peptide of the formula (GGGGS)n (SEQ ID NO: 1), where n is 1, 2, 3, 4, 5, 6, 7, or 8.

[0728] Aspect 54. A single-chain T-cell modulatory antigen-presenting polypeptide comprising: i) an epitope capable of being bound by a T-cell receptor (TCR); ii) an major histocompatibility complex (MHC) Class II α1 polypeptide; iii) an MHC Class II α2 polypeptide; iv) an MHC Class II β1 polypeptide; v) an MHC Class II β2 polypeptide; vi) an immunomodulatory polypeptide; and vii) optionally an immunoglobulin (Ig) Fc polypeptide or a non-Ig scaffold.

[0729] Aspect 55. The single-chain T-cell modulatory antigen-presenting polypeptide of aspect 54 comprising, in order from N-terminus to C-terminus: i) the epitope; ii) the MHC Class II β1 polypeptide; iii) the MHC Class II α1 polypeptide; iv) the MHC Class II α2 polypeptide; v) the MHC Class II β2 polypeptide; and vi) the immunomodulatory polypeptide.

[0730] Aspect 56. The single-chain T-cell modulatory antigen-presenting polypeptide of aspect 54 comprising, in order from N-terminus to C-terminus: i) the epitope; ii) a first immunomodulatory polypeptide; iii) the MHC Class II β1 polypeptide; iv) the MHC Class II α1 polypeptide; v) the MHC Class II α2 polypeptide; vi) the MHC Class II β2 polypeptide; and vii) a second immunomodulatory polypeptide, wherein the first and the second immunomodulatory polypeptides comprise the same amino acid sequence.

[0731] Aspect 57. The single-chain T-cell modulatory antigen-presenting polypeptide of aspect 54 comprising, in order from N-terminus to C-terminus: i) the immunomodulatory polypeptide; ii) the epitope; iii) the MHC Class II β1 polypeptide; iv) the MHC Class II α1 polypeptide; v) the MHC Class II α2 polypeptide; and vi) the MHC Class II β2 polypeptide.

[0732] Aspect 58. The single-chain T-cell modulatory antigen-presenting polypeptide of aspect 54 comprising, in order from N-terminus to C-terminus: i) the epitope; ii) the MHC Class II β1 polypeptide; iii) the MHC Class II β2 polypeptide; iv) the MHC Class II α1 polypeptide; v) the MHC Class II α2 polypeptide; and vi) the immunomodulatory polypeptide.

[0733] Aspect 59. The single-chain T-cell modulatory antigen-presenting polypeptide of aspect 54 comprising, in order from N-terminus to C-terminus: i) the epitope; ii) the immunomodulatory polypeptide; iii) the MHC Class II β1 polypeptide; iv) the MHC Class II β2 polypeptide; v) the MHC Class II α1 polypeptide; and vi) the MHC Class II α2 polypeptide.

[0734] Aspect 60. The single-chain T-cell modulatory antigen-presenting polypeptide of aspect 54 comprising, in order from N-terminus to C-terminus: i) the immunomodulatory polypeptide; ii) the epitope; iii) the MHC Class II β1 polypeptide; iv) the MHC Class II β2 polypeptide; v) the MHC Class II α1 polypeptide; and vi) the MHC Class II α2 polypeptide.

[0735] Aspect 61. The single-chain T-cell modulatory antigen-presenting polypeptide of any one of aspects 54-60, wherein the MHC Class II α1 polypeptide comprises an amino acid sequence having at least 95% amino acid sequence identity to an MHC Class II α1 polypeptide depicted in any one of FIGS. 6, 11, 13, 15, 17, and 18.

[0736] Aspect 62. The single-chain T-cell modulatory antigen-presenting polypeptide of any one of aspects 54-60, wherein the MHC Class II α2 polypeptide comprises an amino acid sequence having at least 95% amino acid sequence identity to an MHC Class II α2 polypeptide depicted in any one of FIGS. 6, 11, 13, 15, 17, and 18.

[0737] Aspect 63. The single-chain T-cell modulatory antigen-presenting polypeptide of any one of aspects 54-60, wherein the MHC Class II β1 polypeptide comprises an amino acid sequence having at least 95% amino acid sequence identity to an MHC Class II β1 polypeptide depicted in any one of FIG. 7A-7J, FIG. 8A-8B, FIG. 9, FIG. 10, FIG. 12, FIG. 14, FIG. 16, FIG. 19A-19B, and FIG. 20A-20B.

[0738] Aspect 64. The single-chain T-cell modulatory antigen-presenting polypeptide of any one of aspects 54-60, wherein the MHC Class II β2 polypeptide comprises an amino acid sequence having at least 95% amino acid sequence identity to an MHC Class II β2 polypeptide depicted in any one of FIG. 7A-7J, FIG. 8A-8B, FIG. 9, FIG. 10, FIG. 12, FIG. 14, FIG. 16, FIG. 19A-19B, and FIG. 20A-20B.

[0739] Aspect 65. The single-chain T-cell modulatory antigen-presenting polypeptide of any one of aspects 54-64, wherein the immunomodulatory polypeptide comprises the amino acid sequence of a naturally-occurring immunomodulatory polypeptide.

[0740] Aspect 66. The single-chain T-cell modulatory antigen-presenting polypeptide of aspect 65, wherein the immunomodulatory polypeptide is selected from the group consisting of IL-2, 4-1BBL, PD-L1, CD80, CD86, B7-1, ICOS-L, OX-40L, FasL, JAG1, TGFβ, and PD-L2.

[0741] Aspect 67. The single-chain T-cell modulatory antigen-presenting polypeptide of any one of aspects 54-64, wherein the immunomodulatory polypeptide is a variant immunomodulatory polypeptide that comprises an amino acid sequence having from 1 to 10 amino acid substitutions compared to the amino acid sequence of a naturally-occurring immunomodulatory polypeptide, wherein the variant immunomodulatory polypeptide has reduced affinity for a co-immunomodulatory polypeptide, compared to the affinity of the naturally-occurring immunomodulatory polypeptide for the co-immunomodulatory polypeptide.

[0742] Aspect 68. The single-chain T-cell modulatory antigen-presenting polypeptide of aspect 67, wherein the variant immunomodulatory polypeptide is a variant 4-1BBL polypeptide.

[0743] Aspect 69. The single-chain T-cell modulatory antigen-presenting polypeptide of aspect 67, wherein the variant immunomodulatory polypeptide is a variant CD80 polypeptide.

[0744] Aspect 70. The single-chain T-cell modulatory antigen-presenting polypeptide of aspect 67, wherein the variant immunomodulatory polypeptide is a variant IL-2 polypeptide.

[0745] Aspect 71. The single-chain T-cell modulatory antigen-presenting polypeptide of aspect 67, wherein the variant immunomodulatory polypeptide is a variant CD86 polypeptide.

[0746] Aspect 72. The single-chain T-cell modulatory antigen-presenting polypeptide of aspect 67, wherein the variant immunomodulatory polypeptide is a variant PD-L1 polypeptide.

[0747] Aspect 73. The single-chain T-cell modulatory antigen-presenting polypeptide of any one of aspects 54-72, wherein the polypeptide comprises two immunomodulatory polypeptides.

[0748] Aspect 74. The single-chain T-cell modulatory antigen-presenting polypeptide of aspect 73, wherein the two immunomodulatory polypeptides comprise the same amino acid sequence.

[0749] Aspect 75. The single-chain T-cell modulatory antigen-presenting polypeptide of any one of aspects 54-74, wherein the multimeric polypeptide comprises a peptide linker between one or more of: a) the epitope and the MHC polypeptide; b) any two adjacent MHC polypeptides; c) the MHC polypeptide and the Fc polypeptide; and d) two adjacent immunomodulatory polypeptides.

[0750] Aspect 76. The single-chain T-cell modulatory antigen-presenting polypeptide of aspect 75, wherein the linker has a length of from 20 amino acids to 40 amino acids.

[0751] Aspect 77. The single-chain T-cell modulatory antigen-presenting polypeptide of aspect 75 or 76, wherein the linker is a peptide of the formula (GGGGS)n (SEQ ID NO:1), where n is 1, 2, 3, 4, 5, 6, 7, or 8.

[0752] Aspect 78. The multimeric T-cell modulatory antigen-presenting polypeptide of any one of aspects 24-53, or the single-chain T-cell modulatory antigen-presenting polypeptide of any one of aspects 54-77, comprising an Ig Fc polypeptide, and wherein the Ig Fc polypeptide is an IgG1 Fc polypeptide, an IgG2 Fc polypeptide, an IgG3 Fc polypeptide, an IgG4 Fc polypeptide, an IgA Fc polypeptide, or an IgM Fc polypeptide.

[0753] Aspect 79. The multimeric T-cell modulatory antigen-presenting polypeptide or single-chain T-cell modulatory antigen-presenting polypeptide of aspect 78, wherein a drug is conjugated to the Ig Fc polypeptide.

[0754] Aspect 80. The multimeric T-cell modulatory antigen-presenting polypeptide of any one of aspects 24-53, or the single-chain T-cell modulatory antigen-presenting polypeptide of any one of aspects 54-77, wherein the epitope is a cancer epitope.

[0755] Aspect 81. The multimeric T-cell modulatory antigen-presenting polypeptide of any one of aspects 24-53, or the single-chain T-cell modulatory antigen-presenting polypeptide of any one of aspects 54-77, wherein the epitope is an auto-epitope.

[0756] Aspect 82. The multimeric T-cell modulatory antigen-presenting polypeptide of any one of aspects 24-53, or the single-chain T-cell modulatory antigen-presenting polypeptide of any one of aspects 54-77, wherein the first and the second MHC class II polypeptides comprise:

[0757] i) an MHC class II α chain polypeptide having at least 90% amino acid sequence identity to a DRA1*01:01 polypeptide; and an MHC class II β chain polypeptide having at least 90% amino acid sequence identity to a DRB1 polypeptide; or

[0758] ii) an MHC class II α chain polypeptide having at least 90% amino acid sequence identity to a DRA1 polypeptide; and an MHC class II DRB1 chain polypeptide having at least 90% amino acid sequence identity to a DRB1 polypeptide of one of the following alleles: DRB1*01:01, DRB1*01:02, DRB1*01:03, DRB1*0301, DRB1*03:02, DRB1*0304, DRB1*04:01, DRB1*04:02, DRB1*0403, DRB1*04:04, DRB1*04:05, DRB1*04:06, DRB1*04:08, DRB1*08:03, DRB1*09:01, DRB1*10:01, DRB1*11:04, DRB1*13:01, DRB1*14:02, DRB1*1501, DRB1*1502, and DRB1*1503; or

[0759] iii) an MHC class II α chain polypeptide having at least 90% amino acid sequence identity to a DQA1 polypeptide of one of the following alleles: DQA1*01:01, DQA*01:02, DQA1*01:04, DQA1*03:01, DQA1*03:02, DQA1*04:01, DQA1*05:01; and an MHC class II β chain polypeptide having at least 90% amino acid sequence identity to a DQB1 polypeptide; or

[0760] iv) an MHC class II α chain polypeptide having at least 90% amino acid sequence identity to a DQA1 polypeptide; and an MHC class II β chain polypeptide having at least 90% amino acid sequence identity to a DQB1 polypeptide of one of the following alleles: DQB1*02:01, DQB1*03:01, DQB1*03:03, DQB1*04:01, DQB1*04:02, DQB1*05:01, DQB1*05:03, DQB1*06:01, and DQB1*0602; or

[0761] v) an MHC class II α chain polypeptide having at least 90% amino acid sequence identity to a DRA3 polypeptide; and an MHC class II β chain polypeptide having at least 90% amino acid sequence identity to a DRB3 polypeptide of one of the following alleles: DRB3*01:01 and DRB3*03:01; or

[0762] vi) an MHC class II α chain polypeptide having at least 90% amino acid sequence identity to a DRA4 polypeptide; and an MHC class II β chain polypeptide having at least 90% amino acid sequence identity to a DRB4*01:01 polypeptide; or

[0763] vii) an MHC class II α chain polypeptide having at least 90% amino acid sequence identity to a DRA1 polypeptide; and an MHC class II β chain polypeptide having at least 90% amino acid sequence identity to a DRB5*01:01 polypeptide; or

[0764] viii) an MHC class II α chain polypeptide having at least 90% amino acid sequence identity to a DPA1 polypeptide; and an MHC class II β chain polypeptide having at least 90% amino acid sequence identity to a DPB1 polypeptide of one of the following alleles: DPB1*03:01, DPB1*09:01, and DPB1*13:01.

[0765] Aspect 83. A composition comprising: a) an antigen-presenting polypeptide of any one of aspects 1-82; and b) a buffer.

[0766] Aspect 84. A composition comprising: a) the T-cell modulatory antigen-presenting polypeptide of any one of aspects 24-77 and 82; and b) a pharmaceutically acceptable excipient.

[0767] Aspect 85. A composition comprising: a) the T-cell modulatory antigen-presenting polypeptide of any one of aspects 24-77 and 82; and b) saline.

[0768] Aspect 86. The composition of aspect 85, wherein the saline is 0.9% NaCl.

[0769] Aspect 87. The composition of aspect 85 or aspect 86, wherein the composition is sterile.

[0770] Aspect 88. One or more nucleic acids comprising nucleotide sequences encoding the antigen-presenting polypeptide of any one of aspects 1-23.

[0771] Aspect 89. One or more recombinant expression vectors comprising the one or more nucleic acids of aspect 88.

[0772] Aspect 90. A host cell genetically modified with the one or more nucleic acids of aspect 88 or the one or more recombinant expression vectors of aspect 89.

[0773] Aspect 91. The host cell of aspect 90, wherein the host cell is a eukaryotic cell.

[0774] Aspect 92. One or more nucleic acids comprising nucleotide sequences encoding the T-cell modulatory antigen-presenting polypeptide of any one of aspects 24-77.

[0775] Aspect 93. One or more recombinant expression vectors comprising the one or more nucleic acids of aspect 92.

[0776] Aspect 94. A host cell genetically modified with the one or more nucleic acids of aspect 91 or the one or more recombinant expression vectors of aspect 93.

[0777] Aspect 95. The host cell of aspect 93, wherein the host cell is a eukaryotic cell.

[0778] Aspect 96. A method of detecting an antigen-specific T cell, the method comprising contacting a T cell with the antigen-presenting polypeptide of any one of aspects 1-23, wherein binding of the antigen-presenting polypeptide to the T cell indicates that the T cell is specific for the epitope present in the antigen-presenting polypeptide.

[0779] Aspect 97. The method of aspect 96, wherein the antigen-presenting polypeptide comprises a detectable label.

[0780] Aspect 98. The method of aspect 97, wherein the detectable label is a radioisotope, a fluorescent polypeptide, or an enzyme that generates a fluorescent product, an enzyme that generates a colored product.

[0781] Aspect 99. The method of aspect 96, wherein binding of the antigen-presenting polypeptide to the T cell is detected using a detectably labeled antibody specific for the antigen-presenting polypeptide.

[0782] Aspect 100. The method of any one of aspects 96-99, wherein the T cell is present in a sample comprising a plurality of T cells.

[0783] Aspect 101. A method of selectively modulating the activity of an epitope-specific T cell, the method comprising contacting the T cell with the T-cell modulatory antigen-presenting polypeptide of any one of aspects 24-77 and 82, wherein said contacting selectively modulates the activity of the epitope-specific T cell.

[0784] Aspect 102. The method of aspect 101, wherein said contacting is in vitro.

[0785] Aspect 103. The method of aspect 101, wherein said contacting is in vivo.

[0786] Aspect 104. The method of any one of aspects 101-103, wherein the T-cell is a regulatory T cell (Treg).

[0787] Aspect 105. The method of aspect 104, wherein said contacting activates the Treg and reduces activity of an autoreactive T cell.

[0788] Aspect 106. The method of any one of aspects 101-105, wherein the T-cell is a CD4⁺ T helper cell, and wherein said contacting activates the CD4⁺ T cell.

[0789] Aspect 107. The method of aspect 106, wherein said activated CD4⁺ T cell activates a CD8⁺ T cell.

[0790] Aspect 108. The method of aspect 107, wherein the CD8⁺ T cell is specific for a cancer epitope presented by the T-cell modulatory antigen-presenting polypeptide.

[0791] Aspect 109. The method of any one of aspects 101 and 103-108, comprising administering the T-cell modulatory antigen-presenting polypeptide to an individual in need thereof.

[0792] Aspect 110. The method of aspect 109, wherein said administering is systemic.

[0793] Aspect 111. The method of aspect 109, wherein said administering is local.

[0794] Aspect 112. The method of aspect 109, wherein said administering is peritumoral.

[0795] Aspect 113. The method of aspect 109, wherein said administering is via intravenous administration.

[0796] Aspect 114. The method of any one of aspects 101-113, wherein the individual is a human

[0797] Aspect 115. The method of aspect 114, wherein the individual has an autoimmune disease.

[0798] Aspect 116. The method of aspect 114, wherein the individual has a cancer.

[0799] Aspect 117. A treatment method, the method comprising administering to an individual in need thereof an effective amount of the T-cell modulatory antigen-presenting polypeptide of any one of aspects 24-77 and 82, wherein said administering treats the individual.

[0800] Aspect 118. The method of aspect 117, wherein the individual has cancer, and wherein said administering treats the cancer.

[0801] Aspect 119. The method of aspect 117, wherein the individual has an autoimmune disorder, and wherein said administering treats the autoimmune disorder.

[0802] Aspect 120. The method of any one of aspects 117-119, wherein said administering is via intravenous administration.

[0803] Aspect 121. The method of any one of aspects 117-119, wherein said administering is via local administration.

[0804] Aspect 122. The method of any one of aspects 117-119, wherein said administering is via systemic administration.

### Aspects Set B

[0805] Without limiting the foregoing description, certain non-limiting aspects of the disclosure numbered 1-23 are provided below. As will be apparent to those of skill in the art upon reading this disclosure, each of the individually numbered aspects may be used or combined with any of the preceding or following individually numbered aspects. This is intended to provide support for all such combinations of aspects and is not limited to combinations of aspects explicitly provided below:

[0806] Aspect 1. A multimeric T-cell modulatory antigen-presenting polypeptide comprising:

[0807] a) a first polypeptide comprising: i) a peptide that displays an autoimmune disease-associated epitope useful for treating an autoimmune disease other than, or in addition to, Type 1 Diabetes or celiac disease, wherein the epitope is capable of being bound by a T-cell receptor (TCR); ii) a first major histocompatibility complex (MHC) class II polypeptide; and

[0808] b) a second polypeptide comprising: i) a second MHC Class II polypeptide; and

[0809] wherein one or both polypeptides of the multimeric polypeptide comprises one or more immunomodulatory polypeptides,

[0810] wherein the first and the second MHC class II polypeptides comprise:

[0811] i) an MHC class II α chain polypeptide having at least 90% amino acid sequence identity to a DRA1*01:01 polypeptide; and an MHC class II β chain polypeptide having at least 90% amino acid sequence identity to a DRB1 polypeptide; or

[0812] ii) an MHC class II α chain polypeptide having at least 90% amino acid sequence identity to a DRA1 polypeptide; and an MHC class II DRB1 chain polypeptide having at least 90% amino acid sequence identity to a DRB1 polypeptide of one of the following alleles: DRB1*01:01, DRB1*01:02, DRB1*01:03, DRB1*0301, DRB1*03:02, DRB1*0304, DRB1*04:01, DRB1*04:02, DRB1*0403, DRB1*04:04, DRB1*04:05, DRB1*04:06, DRB1*04:08, DRB1*08:03, DRB1*09:01, DRB1*10:01, DRB1*11:04, DRB1*13:01, DRB1*14:02, DRB1*1501, DRB1*1502, and DRB1*1503; or

[0813] iii) an MHC class II α chain polypeptide having at least 90% amino acid sequence identity to a DQA1 polypeptide of one of the following alleles: DQA1*01:01, DQA*01:02, DQA1*01:04, DQA1*03:01, DQA1*03:02, DQA1*04:01, DQA1*05:01; and an MHC class II β chain polypeptide having at least 90% amino acid sequence identity to a DQB1 polypeptide; or

[0814] iv) an MHC class II α chain polypeptide having at least 90% amino acid sequence identity to a DQA1 polypeptide; and an MHC class II β chain polypeptide having at least 90% amino acid sequence identity to a DQB1 polypeptide of one of the following alleles: DQB1*02:01, DQB1*03:01, DQB1*03:03, DQB1*04:01, DQB1*04:02, DQB1*05:01, DQB1*05:03, DQB1*06:01, and DQB1*0602; or

[0815] v) an MHC class II α chain polypeptide having at least 90% amino acid sequence identity to a DRA3 polypeptide; and an MHC class II β chain polypeptide having at least 90% amino acid sequence identity to a DRB3 polypeptide of one of the following alleles: DRB3*01:01 and DRB3*03:01; or

[0816] vi) an MHC class II α chain polypeptide having at least 90% amino acid sequence identity to a DRA4 polypeptide; and an MHC class II β chain polypeptide having at least 90% amino acid sequence identity to a DRB4*01:01 polypeptide; or

[0817] vii) an MHC class II α chain polypeptide having at least 90% amino acid sequence identity to a DRA1 polypeptide; and an MHC class II β chain polypeptide having at least 90% amino acid sequence identity to a DRB5*01:01 polypeptide; or

[0818] viii) an MHC class II α chain polypeptide having at least 90% amino acid sequence identity to a DPA1 polypeptide; and an MHC class II β chain polypeptide having at least 90% amino acid sequence identity to a DPB1 polypeptide of one of the following alleles: DPB1*03:01, DPB1*09:01, and DPB1*13:01,

[0819] wherein one or both polypeptides of the multimeric polypeptide optionally comprises an immunoglobulin (Ig) Fc polypeptide or a non-Ig scaffold.

[0820] Aspect 2. The multimeric T-cell modulatory antigen-presenting polypeptide of aspect 1, wherein:

[0821] a1) the first polypeptide comprises, in order from N-terminus to C-terminus:
[0822] i) the peptide epitope;
[0823] ii) an MHC Class II β1 polypeptide; and
[0824] iii) an MHC Class II β2 polypeptide; and

[0825] b1) the second polypeptide comprises, in order from N-terminus to C-terminus:
[0826] i) the one or more immunomodulatory polypeptides;
[0827] ii) an MHC Class II α1 polypeptide;
[0828] iii) an MHC Class II α2 polypeptide; and
[0829] iv) an Ig Fc polypeptide; or

[0830] a2) the first polypeptide comprises, in order from N-terminus to C-terminus:
[0831] i) the peptide epitope;
[0832] ii) an MHC Class II β1 polypeptide; and
[0833] iii) an MHC Class II β2 polypeptide; and

[0834] b2) the second polypeptide comprises, in order from N-terminus to C-terminus:
[0835] i) an MHC Class II α1 polypeptide;
[0836] ii) an MHC Class II α2 polypeptide;
[0837] iii) an Ig Fc polypeptide; and
[0838] iv) the one or more immunomodulatory polypeptides; or

[0839] a3) the first polypeptide comprises, in order from N-terminus to C-terminus:
[0840] i) the peptide epitope;
[0841] ii) an MHC Class II β1 polypeptide; and
[0842] iii) an MHC Class II β2 polypeptide; and

[0843] b3) the second polypeptide comprises, in order from N-terminus to C-terminus:
[0844] i) an MHC Class II α1 polypeptide;
[0845] ii) an MHC Class II α2 polypeptide;
[0846] iii) the one or more immunomodulatory polypeptides; and
[0847] iv) an Ig Fc polypeptide; or

[0848] a4) the first polypeptide comprises, in order from N-terminus to C-terminus:
[0849] i) an MHC Class II α1 polypeptide;
[0850] ii) an MHC Class II α2 polypeptide; and
[0851] iii) an Ig Fc polypeptide; and

[0852] b4) the second polypeptide comprises, in order from N-terminus to C-terminus:
[0853] i) the one or more immunomodulatory polypeptides;
[0854] ii) the peptide epitope;
[0855] iii) an MHC Class II β1 polypeptide; and
[0856] iv) an MHC Class II β2 polypeptide; or

[0857] a5) the first polypeptide comprises, in order from N-terminus to C-terminus:
[0858] i) an MHC Class II α1 polypeptide;
[0859] ii) an MHC Class II α2 polypeptide; and
[0860] iii) an Ig Fc polypeptide; and

[0861] b5) the second polypeptide comprises, in order from N-terminus to C-terminus:
[0862] i) the peptide epitope;
[0863] ii) an MHC Class II β1 polypeptide;
[0864] iii) an MHC Class II β2 polypeptide; and
[0865] iv) the one or more immunomodulatory polypeptides.

[0866] Aspect 3. The multimeric T-cell modulatory antigen-presenting polypeptide of aspect 1 or aspect 2, wherein:

[0867] a) the MHC class II α polypeptide comprises an amino acid sequence having at least 95% amino acid sequence identity to a DQA1*01:01 polypeptide; and the MHC class II β polypeptide comprises an amino acid sequence having at least 95% amino acid sequence identity to a DQB1*05:01 polypeptide; or

[0868] b) the MHC class II α polypeptide comprises an amino acid sequence having at least 95% amino acid sequence identity to a DRA1*01:01 polypeptide; and the MHC class II β polypeptide comprises an amino acid sequence having at least 95% amino acid sequence identity to a DRB1*04:01 polypeptide; or

[0869] c) the MHC class II α polypeptide comprises an amino acid sequence having at least 95% amino acid sequence identity to a DRA1*01:01 polypeptide; and the MHC class II β polypeptide comprises an amino acid sequence having at least 95% amino acid sequence identity to a DRB5*01:01 polypeptide; or

[0870] d) the MHC class II α polypeptide comprises an amino acid sequence having at least 95% amino acid sequence identity to a DQA1*01:02 polypeptide; and the MHC class II β polypeptide comprises an amino acid sequence having at least 95% amino acid sequence identity to a DQB1*06:02 polypeptide; or

[0871] e) the MHC class II α polypeptide comprises an amino acid sequence having at least 95% amino acid sequence identity to a DQA1*03:01 polypeptide; and the MHC class II β polypeptide comprises an amino acid sequence having at least 95% amino acid sequence identity to a DQB1*03:03 polypeptide; or

[0872] f) the MHC class II α polypeptide comprises an amino acid sequence having at least 95% amino acid sequence identity to a DQA1*01:04 polypeptide; and the MHC class II β polypeptide comprises an amino acid sequence having at least 95% amino acid sequence identity to a DQB1*05:01 polypeptide; or

[0873] g) the MHC class II α polypeptide comprises an amino acid sequence having at least 95% amino acid sequence identity to a DRA1*01:01 polypeptide; and the MHC class II β polypeptide comprises an amino acid sequence having at least 95% amino acid sequence identity to a DRB1*01:01 polypeptide; or

[0874] h) the MHC class II α polypeptide comprises an amino acid sequence having at least 95% amino acid sequence identity to a DQA1*04:01 polypeptide; and the MHC class II β polypeptide comprises an amino acid sequence having at least 95% amino acid sequence identity to a DQB1*04:02 polypeptide; or

[0875] i) the MHC class II α polypeptide comprises an amino acid sequence having at least 95% amino acid sequence identity to a DQA1*03:02 polypeptide; and the MHC class II β polypeptide comprises an amino acid sequence having at least 95% amino acid sequence identity to a DQB1*03:01 polypeptide.

[0876] Aspect 4. The T-cell modulatory antigen-presenting polypeptide of any one of aspects 1-3, wherein the immunomodulatory polypeptide:

[0877] a) comprises the amino acid sequence of a naturally-occurring immunomodulatory polypeptide; or

[0878] b) is a variant immunomodulatory polypeptide that comprises an amino acid sequence having from 1 to 10 amino acid substitutions compared to the amino acid sequence of a naturally-occurring immunomodulatory polypeptide, wherein the variant immunomodulatory polypeptide has reduced affinity for a co-immunomodulatory polypeptide, compared to the affinity of the naturally-occurring immunomodulatory polypeptide for the co-immunomodulatory polypeptide.

[0879] Aspect 5. The T-cell modulatory antigen-presenting polypeptide of any one of aspects 1-4, wherein the immunomodulatory polypeptide is a PD-L1 polypeptide, a FasL polypeptide, or a TGF-β polypeptide.

[0880] Aspect 6. The T-cell modulatory antigen-presenting polypeptide of any one of aspects 1-4, wherein the immunomodulatory polypeptide is a PD-L1 polypeptide.

[0881] Aspect 7. The T-cell modulatory antigen-presenting polypeptide of aspect 1, wherein the autoimmune disease-associated peptide has a length of from about 4 amino acids to about 25 amino acids.

[0882] Aspect 8. The T-cell modulatory antigen-presenting polypeptide any one of aspects 1-7, wherein the peptide is a multiple sclerosis-associated peptide.

[0883] Aspect 9. The T-cell modulatory antigen-presenting polypeptide of any one of aspects 1-7, wherein the peptide is a rheumatoid arthritis-associated peptide.

[0884] Aspect 10. The T-cell modulatory antigen-presenting polypeptide of aspect 1, wherein the peptide is a systemic lupus erythematosus-associated peptide.

[0885] Aspect 11. The T-cell modulatory antigen-presenting polypeptide of aspect 1, wherein the peptide is an Addison's disease-associated peptide.

[0886] Aspect 12. The T-cell modulatory antigen-presenting polypeptide of aspect 1, wherein the peptide is a myasthenia gravis-associated peptide.

[0887] Aspect 13. The T-cell modulatory antigen-presenting polypeptide of aspect 1, wherein the peptide is a Sjögren's syndrome-associated peptide.

[0888] Aspect 14. The T-cell modulatory antigen-presenting polypeptide of aspect 1, wherein the peptide is a psoriasis-associated peptide.

[0889] Aspect 15. A composition comprising: a) the T-cell modulatory antigen-presenting polypeptide of any one of aspects 1-14; and b) a pharmaceutically acceptable excipient.

[0890] Aspect 16. One or more nucleic acids comprising nucleotide sequences encoding the T-cell modulatory antigen-presenting polypeptide of any one of aspects 1-14.

[0891] Aspect 17. One or more expression vectors comprising the one or more nucleic acids of aspect 16.

[0892] Aspect 18. A host cell genetically modified with the one or more nucleic acids of aspect 16 or the one or more expression vectors of aspect 17.

[0893] Aspect 19. A method of reducing the number and/or activity of CD4⁺ T cells specific for an autoimmune disease in an individual, the method comprising contacting the CD4⁺ T cells with the T-cell modulatory antigen-presenting polypeptide of any one of aspects 1-14, wherein said contacting reduces the number and/or activity of the CD4⁺ T cells, and wherein the autoimmune disease is other than T1D or celiac disease.

[0894] Aspect 20. A method of treating an autoimmune disease in an individual, the method comprising administering to an individual in need thereof an effective amount of the T-cell modulatory antigen-presenting polypeptide of any one of aspects 1-14, wherein said administering treats the autoimmune disease in the individual, and wherein the autoimmune disease is other than T1D or celiac disease.

[0895] Aspect 21. The method of aspect 20, wherein the autoimmune disease is Addison's disease, alopecia areata, ankylosing spondylitis, autoimmune encephalomyelitis, autoimmune hemolytic anemia, autoimmune hepatitis, autoimmune-associated infertility, autoimmune thrombocytopenic purpura, bullous pemphigoid, Crohn's disease, Goodpasture's syndrome, glomerulonephritis (e.g., crescentic glomerulonephritis, proliferative glomerulonephritis), Grave's disease, Hashimoto's thyroiditis, mixed connective tissue disease, multiple sclerosis, myasthenia gravis (MG), pemphigus (e.g., pemphigus vulgaris), pernicious anemia, polymyositis, psoriasis, psoriatic arthritis, rheumatoid arthritis, scleroderma, Sjögren's syndrome, systemic lupus erythematosus (SLE), vasculitis, or vitiligo.

[0896] Aspect 22. A method of reducing the number and/or activity of pathogenic CD4⁺ and/or CD8⁺ self-reactive T cells specific for an autoimmune disease in an individual, the method comprising contacting the CD4⁺ T cells with the T-cell modulatory antigen-presenting polypeptide of any one of aspects 1-14, wherein said contacting reduces the number and/or activity of the pathogenic CD4⁺ and/or CD8+ T cells, and wherein the autoimmune disease is other than T1D or celiac disease.

[0897] Aspect 23. A method of reducing the number and/or activity of CD4⁺ T cells and/or CD8⁺ self-reactive T cells specific for autoimmune disease in an individual, the method comprising contacting the CD4⁺ T cells with the T-cell modulatory antigen-presenting polypeptide of any one of aspects 1-14, wherein said contacting increases the number of CD4⁺ Treg cells, which in turn reduces the number and/or activity of the pathogenic CD4⁺ T cells and/or CD8+ T cells, and wherein the autoimmune disease is other than T1D or celiac disease.

### EXAMPLES

[0898] The following examples are put forth so as to provide those of ordinary skill in the art with a complete disclosure and description of how to make and use the present invention, and are not intended to limit the scope of what the inventors regard as their invention nor are they intended to represent that the experiments below are all or the only experiments performed. Efforts have been made to ensure accuracy with respect to numbers used (e.g. amounts, temperature, etc.) but some experimental errors and deviations should be accounted for. Unless indicated otherwise, parts are parts by weight, molecular weight is weight average molecular weight, temperature is in degrees Celsius, and pressure is at or near atmospheric. Standard abbreviations may be used, e.g., bp, base pair(s); kb, kilobase(s); pl, picoliter(s); s or sec, second(s); min, minute(s); h or hr, hour(s); aa, amino acid(s); kb, kilobase(s); bp, base pair(s); nt, nucleotide(s); i.m., intramuscular(ly); i.p., intraperitoneal(ly); s.c., subcutaneous(ly); and the like.

### Example 1: Production of Antigen-Presenting Polypeptides

[0899] To optimize production of intact and stable MHC Class II antigen-presenting polypeptides, various structural arrangements of antigen-presenting polypeptides comprising MHC Class II polypeptides were synthesized, expressed, and purified using Protein A affinity chromatography. For the design of the MHC Class II synTacs, parameters varied included orientation of the MHC Class II alpha and beta chains, Fc placement, IL2 (MOD) placement, and length and content of the various linkers. The variants presented include single-chain as well as two-chain versions, each with the MHC Class II β-1 domain linked N-terminal to the α-1 domain, and with β-2 either C-terminal to α-2 or on a separate chain, as shown schematically in FIG. 24. Single-chain variants with and without the β-2 domain or the IL2 fusion are shown, as well as two-chain versions with and without the bZIP dimerization domain

[0900] Antigen-presenting polypeptides, with or without immunomodulatory polypeptides, were generated Amino acid sequences of the antigen-presenting polypeptides, and nucleotide sequences encoding the polypeptides, are provided in FIG. 25-35. The polypeptides included single-chain polypeptides and multimeric polypeptides. The antigen-presenting polypeptides are as follows:

[0901] 1) 1599—This is a single-chain polypeptide comprising a variant IL-2 immunomodulatory polypeptide. The 1599 polypeptide also includes an HLA β2 polypeptide. The 1599 polypeptide includes: i) an epitope (a hemagglutinin epitope); ii) HLA DRB1 β1; iii) HLA DRA α1 and α2; iv) HLA DRB1β2; v) a variant IL-2 immunomodulatory polypeptide; and v) an IgG1 Fc.

[0902] 2) 1559—This is a single-chain polypeptide comprising an HLA β2 polypeptide. The 1559 polypeptide lacks an immunomodulatory polypeptide. The 1559 polypeptide includes: i) an epitope (a hemagglutinin (HA) epitope); ii) HLA DRB1 β1; iii) HLA DRA α1 and α2; iv) HLA DRB1 β2; and v) an IgG1 Fc.

[0903] 3) 1601—This is a single-chain polypeptide a variant IL-2 immunomodulatory polypeptide. The 1601 polypeptide lacks an HLA β2 polypeptide. The 1601 polypeptide includes: i) an epitope (a hemagglutinin epitope); ii) HLA DRB1 β1; iii) HLA DRA α1 and α2; iv) 2 copies of a variant IL-2 immunomodulatory polypeptide; and v) an IgG1 Fc polypeptide.

[0904] 4) 1452+1661—This is a multimeric antigen-presenting polypeptide. The epitope is a hemagglutinin epitope. It includes HLA DRB1 and DRA MHC Class II polypeptides. Both polypeptide chains include leucine zipper dimerizer peptides. The 1452 polypeptide includes an IgG1 Fc polypeptide.

[0905] 5) 1659+1664—This is a multimeric antigen-presenting polypeptide. It includes HLA DRB1 and DRA MHC Class II polypeptides. The epitope is a hemagglutinin epitope. The 1664 polypeptide includes 2 copies of a variant IL-2 immunomodulatory polypeptide. Both polypeptide chains lack leucine zipper dimerizer peptides. The 1659 polypeptide includes an IgG1 Fc polypeptide.

[0906] 6) 1637+1408—This is a multimeric antigen-presenting polypeptide. It includes HLA DRB1 and DRA MHC Class II polypeptides. The epitope is a CMV epitope. The 1408 polypeptide includes 2 copies of a variant IL-2 immunomodulatory polypeptide. Both chains include a leucine zipper (bZIP). The 1637 polypeptide includes an IgG1 Fc polypeptide.

[0907] 7) “DRA-DRB-epitope”+1640—This is a multimeric antigen-presenting polypeptide. It includes HLA DRB1-4 and DRA MHC Class II polypeptides. The epitope is a hemagglutinin epitope. Both chains include a leucine zipper (bZIP). The DRA-DRB-epitope polypeptide includes an IgG1 Fc polypeptide.

[0908] Expression constructs comprising nucleotide sequences encoding the above-described polypeptides were introduced into a mammalian cell line. The produced polypeptides were loaded onto a reducing polyacrylamide gel. As shown in FIG. 24, left panel, all polypeptides were produced in detectable amounts. The various constructs are depicted schematically in FIG. 24, right panel.

[0909] The single-chain version without the β-2 domain (and with IL2) demonstrated a robust expression level and an intact, homogeneous product upon Protein A purification (lane 3). The addition of the β-2 domain resulted in lower expression as well as de-stabilization of the molecule as indicated by a prominent breakdown product observed on the analytical gel (lane 1). Removal of the IL2 (while retaining the β-2) resulted in even lower expression, but with minimal breakdown product (lane 2).

[0910] With the β-2 domain on a separate chain, robust assembly was observed with incorporation of the bZIP leucine zipper dimerization domain (lane 5). Without the bZIP domain, modest expression and production of intact Fc-containing chain was observed; β-2 chain was incorporated (lane 4). Switching from the HA peptide to the CMV peptide in the two-chain bZIP model resulted in very robust expression of intact product (lane 6).

[0911] Therefore, intact, stable MHC Class II antigen-presenting polypeptides were synthesized, expressed and purified. These represented design models that incorporated either a single-chain or a two-chain system. Incorporation of both the β-2 domain and a dimerization domain resulted in robust expression using the two-chain system. The peptide chosen for binding to the MHC can provide stabilization. Further, intact, stable MHC Class II antigen-presenting polypeptides were generated with MHC Class II polypeptides of two different MHC alleles.

[0912] While the present invention has been described with reference to the specific embodiments thereof, it should be understood by those skilled in the art that various changes may be made and equivalents may be substituted without departing from the true spirit and scope of the invention. In addition, many modifications may be made to adapt a particular situation, material, composition of matter, process, process step or steps, to the objective, spirit and scope of the present invention. All such modifications are intended to be within the scope of the claims appended hereto.

1.-21. (canceled)

22. A multimeric T-cell modulatory antigen-presenting polypeptide comprising:
a) a first polypeptide comprising:
i) a peptide that displays an autoimmune disease-associated epitope (peptide epitope) useful for treating an autoimmune disease other than Type 1 Diabetes (T1D) or celiac disease, wherein the epitope is capable of being bound by a T-cell receptor (TCR);
ii) a first major histocompatibility complex (MHC) class II polypeptide; and
b) a second polypeptide comprising:
i) a second MHC Class II polypeptide; and
wherein one or both polypeptides of the multimeric polypeptide comprises one or more immunomodulatory polypeptides,
wherein the first and the second MHC class II polypeptides comprise:
i) an MHC class II α chain polypeptide having at least 90% amino acid sequence identity to a DRA1*01:01 polypeptide; and an MHC class II β chain polypeptide having at least 90% amino acid sequence identity to a DRB1 polypeptide; or
ii) an MHC class II α chain polypeptide having at least 90% amino acid sequence identity to a DRA1 polypeptide; and an MHC class II DRB1 chain polypeptide having at least 90% amino acid sequence identity to a DRB1 polypeptide of one of the following alleles: DRB1*01:01, DRB1*01:02, DRB1*01:03, DRB1*0301, DRB1*03:02, DRB1*0304, DRB1*04:01, DRB1*04:02, DRB1*0403, DRB1*04:04, DRB1*04:05, DRB1*04:06, DRB1*04:08, DRB1*08:03, DRB1*09:01, DRB1*10:01, DRB1*11:04, DRB1*13:01, DRB1*14:02, DRB1*1501, DRB1*1502, and DRB1*1503; or
iii) an MHC class II α chain polypeptide having at least 90% amino acid sequence identity to a DQA1 polypeptide of one of the following alleles: DQA1*01:01, DQA*01:02, DQA1*01:04, DQA1*03:01, DQA1*03:02, DQA1*04:01, DQA1*05:01; and an MHC class II β chain polypeptide having at least 90% amino acid sequence identity to a DQB1 polypeptide; or
iv) an MHC class II α chain polypeptide having at least 90% amino acid sequence identity to a DQA1 polypeptide; and an MHC class II R chain polypeptide having at least 90% amino acid sequence identity to a DQB1 polypeptide of one of the following alleles: DQB1*02:01, DQB1*03:01, DQB1*03:03, DQB1*04:01, DQB1*04:02, DQB1*05:01, DQB1*05:03, DQB1*06:01, and DQB1*0602; or
v) an MHC class II α chain polypeptide having at least 90% amino acid sequence identity to a DRA3 polypeptide; and an MHC class II β chain polypeptide having at least 90% amino acid sequence identity to a DRB3 polypeptide of one of the following alleles: DRB3*01:01 and DRB3*03:01; or
vi) an MHC class II α chain polypeptide having at least 90% amino acid sequence identity to a DRA4 polypeptide; and an MHC class II β chain polypeptide having at least 90% amino acid sequence identity to a DRB4*01:01 polypeptide; or
vii) an MHC class II α chain polypeptide having at least 90% amino acid sequence identity to a DRA1 polypeptide; and an MHC class II β chain polypeptide having at least 90% amino acid sequence identity to a DRB5*01:01 polypeptide; or
viii) an MHC class II α chain polypeptide having at least 90% amino acid sequence identity to a DPA1 polypeptide; and an MHC class II β chain polypeptide having at least 90% amino acid sequence identity to a DPB1 polypeptide of one of the following alleles: DPB1*03:01, DPB1*09:01, and DPB1*13:01,
wherein one or both polypeptides of the multimeric polypeptide optionally comprises an immunoglobulin (Ig) Fc polypeptide or a non-Ig scaffold.

23. The multimeric T-cell modulatory antigen-presenting polypeptide of claim 22, wherein:
a1) the first polypeptide comprises, in order from N-terminus to C-terminus:
i) the peptide epitope;
ii) an MHC Class II β1 polypeptide; and
iii) an MHC Class II β2 polypeptide; and
b1) the second polypeptide comprises, in order from N-terminus to C-terminus:
i) the one or more immunomodulatory polypeptides;
ii) an MHC Class II α1 polypeptide;
iii) an MHC Class II α2 polypeptide; and
iv) an Ig Fc polypeptide; or
a2) the first polypeptide comprises, in order from N-terminus to C-terminus:
i) the peptide epitope;
ii) an MHC Class II β1 polypeptide; and
iii) an MHC Class II β2 polypeptide; and
b2) the second polypeptide comprises, in order from N-terminus to C-terminus:
i) an MHC Class II α1 polypeptide;
ii) an MHC Class II α2 polypeptide;
iii) an Ig Fc polypeptide; and
iv) the one or more immunomodulatory polypeptides; or
a3) the first polypeptide comprises, in order from N-terminus to C-terminus:
i) the peptide epitope;
ii) an MHC Class II β1 polypeptide; and
iii) an MHC Class II β2 polypeptide; and
b3) the second polypeptide comprises, in order from N-terminus to C-terminus:
i) an MHC Class II α1 polypeptide;
ii) an MHC Class II α2 polypeptide;
iii) the one or more immunomodulatory polypeptides; and
iv) an Ig Fc polypeptide; or
a4) the first polypeptide comprises, in order from N-terminus to C-terminus:
i) an MHC Class II α1 polypeptide;
ii) an MHC Class II α2 polypeptide; and
iii) an Ig Fc polypeptide; and
b4) the second polypeptide comprises, in order from N-terminus to C-terminus:
i) the one or more immunomodulatory polypeptides;
ii) the peptide epitope;
iii) an MHC Class II β1 polypeptide; and
iv) an MHC Class II β2 polypeptide; or
a5) the first polypeptide comprises, in order from N-terminus to C-terminus:
i) an MHC Class II α1 polypeptide;
ii) an MHC Class II α2 polypeptide; and
iii) an Ig Fc polypeptide; and
b5) the second polypeptide comprises, in order from N-terminus to C-terminus:
i) the peptide epitope;
ii) an MHC Class II β1 polypeptide;
iii) an MHC Class II β2 polypeptide; and
iv) the one or more immunomodulatory polypeptides.

24. The multimeric T-cell modulatory antigen-presenting polypeptide of claim 22, wherein:
a) the MHC class II α polypeptide comprises an amino acid sequence having at least 95% amino acid sequence identity to a DQA1*01:01 polypeptide; and the MHC class II β polypeptide comprises an amino acid sequence having at least 95% amino acid sequence identity to a DQB1*05:01 polypeptide; or
b) the MHC class II α polypeptide comprises an amino acid sequence having at least 95% amino acid sequence identity to a DRA1*01:01 polypeptide; and the MHC class II β polypeptide comprises an amino acid sequence having at least 95% amino acid sequence identity to a DRB1*04:01 polypeptide; or
c) the MHC class II α polypeptide comprises an amino acid sequence having at least 95% amino acid sequence identity to a DRA1*01:01 polypeptide; and the MHC class II β polypeptide comprises an amino acid sequence having at least 95% amino acid sequence identity to a DRB5*01:01 polypeptide; or
d) the MHC class II α polypeptide comprises an amino acid sequence having at least 95% amino acid sequence identity to a DQA1*01:02 polypeptide; and the MHC class II β polypeptide comprises an amino acid sequence having at least 95% amino acid sequence identity to a DQB1*06:02 polypeptide; or
e) the MHC class II α polypeptide comprises an amino acid sequence having at least 95% amino acid sequence identity to a DQA1*03:01 polypeptide; and the MHC class II β polypeptide comprises an amino acid sequence having at least 95% amino acid sequence identity to a DQB1*03:03 polypeptide; or
f) the MHC class II α polypeptide comprises an amino acid sequence having at least 95% amino acid sequence identity to a DQA1*01:04 polypeptide; and the MHC class II β polypeptide comprises an amino acid sequence having at least 95% amino acid sequence identity to a DQB1*05:01 polypeptide; or
g) the MHC class II α polypeptide comprises an amino acid sequence having at least 95% amino acid sequence identity to a DRA1*01:01 polypeptide; and the MHC class II β polypeptide comprises an amino acid sequence having at least 95% amino acid sequence identity to a DRB1*01:01 polypeptide; or
h) the MHC class II α polypeptide comprises an amino acid sequence having at least 95% amino acid sequence identity to a DQA1*04:01 polypeptide; and the MHC class II β polypeptide comprises an amino acid sequence having at least 95% amino acid sequence identity to a DQB1*04:02 polypeptide; or
i) the MHC class II α polypeptide comprises an amino acid sequence having at least 95% amino acid sequence identity to a DQA1*03:02 polypeptide; and the MHC class II β polypeptide comprises an amino acid sequence having at least 95% amino acid sequence identity to a DQB1*03:01 polypeptide.

25. The T-cell modulatory antigen-presenting polypeptide of claim 22, wherein the immunomodulatory polypeptide:
a) comprises the amino acid sequence of a naturally-occurring immunomodulatory polypeptide; or
b) is a variant immunomodulatory polypeptide that comprises an amino acid sequence having from 1 to 10 amino acid substitutions compared to the amino acid sequence of a naturally-occurring immunomodulatory polypeptide, wherein the variant immunomodulatory polypeptide has reduced affinity for a co-immunomodulatory polypeptide, compared to the affinity of the naturally-occurring immunomodulatory polypeptide for the co-immunomodulatory polypeptide.

26. The T-cell modulatory antigen-presenting polypeptide of claim 22, wherein the immunomodulatory polypeptide is a PD-L1 polypeptide, a FasL polypeptide, or a TGF-β polypeptide.

27. The T-cell modulatory antigen-presenting polypeptide of claim 22, wherein the immunomodulatory polypeptide is a PD-L1 polypeptide.

28. The T-cell modulatory antigen-presenting polypeptide of claim 22, wherein the peptide epitope has a length of from about 4 amino acids to about 25 amino acids.

29. The T-cell modulatory antigen-presenting polypeptide of claim 22, wherein the peptide epitope is a multiple sclerosis-associated peptide epitope, a rheumatoid arthritis-associated peptide epitope, or a systemic lupus erythematosus-associated peptide epitope.

30. The T-cell modulatory antigen-presenting polypeptide of claim 22, wherein the peptide epitope is an Addison's disease-associated peptide epitope, a myasthenia gravis-associated peptide epitope, a Sjögren's syndrome-associated peptide epitope, or a psoriasis-associated peptide epitope.

31. The T-cell modulatory antigen-presenting polypeptide of claim 22, wherein
a) the first polypeptide comprises from N-terminus to C-terminus:
i) a peptide epitope;
ii) a linker; and
iii) an MHC class II beta-chain polypeptide, and
b) the second polypeptide comprises from N-terminus to C-terminus:
i) a PD-L1 immunomodulatory polypeptide;
ii) a linker;
iii) an MHC class II alpha-chain polypeptide;
iv) a linker; and
v) an Ig Fc polypeptide comprising an amino acid sequence having at least 90% amino acid sequence identity to the IgG1 Fc amino acid sequence depicted in FIG. 21A.

32. The T-cell modulatory antigen-presenting polypeptide of claim 31, wherein the Ig Fc polypeptide comprises an Ala at position 14 and an Ala at position 15, based on the amino acid number of FIG. 21A.

33. A pharmaceutical composition comprising the T-cell modulatory antigen-presenting polypeptide of claim 22.

34. A pharmaceutical composition comprising the T-cell modulatory antigen-presenting polypeptide of claim 31.

35. A pharmaceutical composition comprising the T-cell modulatory antigen-presenting polypeptide of claim 32.

36. One or more nucleic acids comprising nucleotide sequences encoding the T-cell modulatory antigen-presenting polypeptide of claim 22.

37. An expression vector or host cell comprising the one or more nucleic acids of claim 36.

38. A method of reducing the number and/or activity of CD⁴⁺ and/or CD8⁺ self-reactive T cells specific for an autoimmune disease other than Type 1 Diabetes (T1D) or celiac disease in an individual, the method comprising contacting the CD⁴⁺ T cells with the T-cell modulatory antigen-presenting polypeptide of claim 22, wherein said contacting reduces the number and/or activity of the CD⁴⁺ and/or CD8+ T cells.

39. A method of treating an autoimmune disease other than Type 1 Diabetes (T1D) or celiac disease in an individual, the method comprising administering to an individual in need thereof an effective amount of the T-cell modulatory antigen-presenting polypeptide of claim 22, wherein said administering treats the type 1 diabetes or celiac disease in the individual.

40. A method of treating an autoimmune disease other than Type 1 Diabetes (T1D) or celiac disease in an individual, the method comprising administering to an individual in need thereof an effective amount of the T-cell modulatory antigen-presenting polypeptide of claim 31.

41. A method of treating an autoimmune disease other than Type 1 Diabetes (T1D) or celiac disease in an individual, the method comprising administering to an individual in need thereof an effective amount of the T-cell modulatory antigen-presenting polypeptide of claim 32.

The application's sequence listing, which the Patent Office published only in electronic form, follows.

SEQUENCE LISTING (437 sequences)

SEQ ID NO: 1 - protein, 40 aa, Artificial sequence
  synthetic sequence
  VARIANT (6)..(40): Each copy of Gly Gly Gly Gly Ser at positions 6 to 40 may either be present or absent.
GGGGSGGGGSGGGGSGGGGSGGGGSGGGGSGGGGSGGGGS

SEQ ID NO: 2 - protein, 8 aa, Artificial sequence
  synthetic sequence
GGSAAAGG

SEQ ID NO: 3 - protein, 106 aa, Artificial sequence
  synthetic sequence
ASTKGPSVFPLAPSSKSTSGGTAALGCLVKDYFPEPVTVSWNSGALTSGVHTFPAVLQSSGLYSLSSVVTVPSSSLGTQTYICNVNHKPSNTKVDKKVEPKSCDKT

SEQ ID NO: 4 - protein, 106 aa, Artificial sequence
  synthetic sequence
TVAAPSVFIFPPSDEQLKSGTASVVCLLNNFYPREAKVQWKVDNALQSGNSQESVTEQDSKDSTYSLSSTLTLSKADYEKHKVYACEVTHQGLSSPVTKSFNRGEC

SEQ ID NO: 5 - protein, 178 aa, Artificial sequence
  synthetic sequence
IKEEHVIIQAEFYLNPDQSGEFMFDFDGDEIFHVDMAKKETVWRLEEFGRFASFEAQGALANIAVDKANLEIMTKRSNYTPITNVPPEVTVLTNSPVELREPNVLICFIDKFTPPVVNVTWLRNGKPVTTGVSETVFLPREDHLFRKFHYLPFLPSTEDVYDCRVEHWGLDEPLLKHW

SEQ ID NO: 6 - protein, 79 aa, Artificial sequence
  synthetic sequence
VIIQAEFYLNPDQSGEFMFDFDGDEIFHVDMAKKETVWRLEEFGRFASFEAQGALANIAVDKANLEIMTKRSNYTPITN

SEQ ID NO: 7 - protein, 94 aa, Artificial sequence
  synthetic sequence
VPPEVTVLTNSPVELREPNVLICFIDKFTPPVVNVTWLRNGKPVTTGVSETVFLPREDHLFRKFHYLPFLPSTEDVYDCRVEHWGLDEPLLKHW

SEQ ID NO: 8 - protein, 191 aa, Artificial sequence
  synthetic sequence
VPEAPTPMWPDDLQNHTFLHTVYCQDGSPSVGLSEAYDEDQLFFFDFSQNTRVPRLPEFADWAQEQGDAPAILFDKEFCEWMIQQIGPKLDGKIPVSRGFPIAEVFTLKPLEFGKPNTLVCFVSNLFPPMLTVNWQHHSVPVEGFGPTFVSAVDGLSFQAFSYLNFTPEPSDIFSCIVTHEIDRYTAIAYW

SEQ ID NO: 9 - protein, 98 aa, Artificial sequence
  synthetic sequence
VPEAPTPMWPDDLQNHTFLHTVYCQDGSPSVGLSEAYDEDQLFFFDFSQNTRVPRLPEFADWAQEQGDAPAILFDKEFCEWMIQQIGPKLDGKIPVSR

SEQ ID NO: 10 - protein, 93 aa, Artificial sequence
  synthetic sequence
GFPIAEVFTLKPLEFGKPNTLVCFVSNLFPPMLTVNWQHHSVPVEGFGPTFVSAVDGLSFQAFSYLNFTPEPSDIFSCIVTHEIDRYTAIAYW

SEQ ID NO: 11 - protein, 179 aa, Artificial sequence
  synthetic sequence
TKADHMGSYGPAFYQSYGASGQFTHEFDEEQLFSVDLKKSEAVWRLPEFGDFARFDPQGGLAGIAAIKAHLDILVERSNRSRAINVPPRVTVLPKSRVELGQPNILICIVDNIFPPVINITWLRNGQTVTEGVAQTSFYSQPDHLFRKFHYLPFVPSAEDVYDCQVEHWGLDAPLLRHW

SEQ ID NO: 12 - protein, 85 aa, Artificial sequence
  synthetic sequence
TKADHMGSYGPAFYQSYGASGQFTHEFDEEQLFSVDLKKSEAVWRLPEFGDFARFDPQGGLAGIAAIKAHLDILVERSNRSRAIN

SEQ ID NO: 13 - protein, 94 aa, Artificial sequence
  synthetic sequence
VPPRVTVLPKSRVELGQPNILICIVDNIFPPVINITWLRNGQTVTEGVAQTSFYSQPDHLFRKFHYLPFVPSAEDVYDCQVEHWGLDAPLLRHW

SEQ ID NO: 14 - protein, 181 aa, Artificial sequence
  synthetic sequence
AGAIKADHVSTYAAFVQTHRPTGEFMFEFDEDEMFYVDLDKKETVWHLEEFGQAFSFEAQGGLANIAILNNNLNTLIQRSNHTQATNDPPEVTVFPKEPVELGQPNTLICHIDKFFPPVLNVTWLCNGELVTEGVAESLFLPRTDYSFHKFHYLTFVPSAEDFYDCRVEHWGLDQPLLKHW

SEQ ID NO: 15 - protein, 85 aa, Artificial sequence
  synthetic sequence
AIKADHVSTYAAFVQTHRPTGEFMFEFDEDEMFYVDLDKKETVWHLEEFGQAFSFEAQGGLANIAILNNNLNTLIQRSNHTQATN

SEQ ID NO: 16 - protein, 94 aa, Artificial sequence
  synthetic sequence
DPPEVTVFPKEPVELGQPNTLICHIDKFFPPVLNVTWLCNGELVTEGVAESLFLPRTDYSFHKFHYLTFVPSAEDFYDCRVEHWGLDQPLLKHW

SEQ ID NO: 17 - protein, 260 aa, Artificial sequence [sequence omitted]

SEQ ID NO: 18 - protein, 181 aa, Artificial sequence
  synthetic sequence
EDIVADHVASCGVNLYQFYGPSGQYTHEFDGDEQFYVDLERKETAWRWPEFSKFGGFDPQGALRNMAVAKHNLNIMIKRYNSTAATNEVPEVTVFSKSPVTLGQPNTLICLVDNIFPPVVNITWLSNGQSVTEGVSETSFLSKSDHSFFKISYLTFLPSADEIYDCKVEHWGLDQPLLKHW

SEQ ID NO: 19 - protein, 87 aa, Artificial sequence
  synthetic sequence
EDIVADHVASCGVNLYQFYGPSGQYTHEFDGDEQFYVDLERKETAWRWPEFSKFGGFDPQGALRNMAVAKHNLNIMIKRYNSTAATN

SEQ ID NO: 20 - protein, 94 aa, Artificial sequence
  synthetic sequence
EVPEVTVFSKSPVTLGQPNTLICLVDNIFPPVVNITWLSNGQSVTEGVSETSFLSKSDHSFFKISYLTFLPSADEIYDCKVEHWGLDQPLLKHW

SEQ ID NO: 21 - protein, 181 aa, Artificial sequence
  synthetic sequence
EDIVADHVASYGVNFYQSHGPSGQYTHEFDGDEEFYVDLETKETVWQLPMFSKFISFDPQSALRNMAVGKHTLEFMMRQSNSTAATNEVPEVTVFSKFPVTLGQPNTLICLVDNIFPPVVNITWLSNGHSVTEGVSETSFLSKSDHSFFKISYLTFLPSADEIYDCKVEHWGLDEPLLKHW

SEQ ID NO: 22 - protein, 87 aa, Artificial sequence
  synthetic sequence
EDIVADHVASYGVNFYQSHGPSGQYTHEFDGDEEFYVDLETKETVWQLPMFSKFISFDPQSALRNMAVGKHTLEFMMRQSNSTAATN

SEQ ID NO: 23 - protein, 94 aa, Artificial sequence
  synthetic sequence
EVPEVTVFSKFPVTLGQPNTLICLVDNIFPPVVNITWLSNGHSVTEGVSETSFLSKSDHSFFKISYLTFLPSADEIYDCKVEHWGLDEPLLKHW

SEQ ID NO: 24 - protein, 197 aa, Artificial sequence
  synthetic sequence
DTRPRFLEQVKHECHFFNGTERVRFLDRYFYHQEEYVRFDSDVGEYRAVTELGRPDAEYWNSQKDLLEQKRAAVDTYCRHNYGVGESFTVQRRVYPEVTVYPAKTQPLQHHNLLVCSVNGFYPGSIEVRWFRNGQEEKTGVVSTGLIQNGDWTFQTLVMLETVPRSGEVYTCQVEHPSLTSPLTVEWRARSESAQSK

SEQ ID NO: 25 - protein, 94 aa, Artificial sequence
  synthetic sequence
DTRPRFLEQVKHECHFFNGTERVRFLDRYFYHQEEYVRFDSDVGEYRAVTELGRPDAEYWNSQKDLLEQKRAAVDTYCRHNYGVGESFTVQRRV

SEQ ID NO: 26 - protein, 103 aa, Artificial sequence
  synthetic sequence
YPEVTVYPAKTQPLQHHNLLVCSVNGFYPGSIEVRWFRNGQEEKTGVVSTGLIQNGDWTFQTLVMLETVPRSGEVYTCQVEHPSLTSPLTVEWRARSESAQSK

SEQ ID NO: 27 - protein, 197 aa, Artificial sequence
  synthetic sequence
DTRPRFLELRKSECHFFNGTERVRYLDRYFHNQEEFLRFDSDVGEYRAVTELGRPVAESWNSQKDLLEQKRGRVDNYCRHNYGVGESFTVQRRVHPQVTVYPAKTQPLQHHNLLVCSVSGFYPGSIEVRWFRNGQEEKAGVVSTGLIQNGDWTFQTLVMLETVPRSGEVYTCQVEHPSVTSALTVEWRARSESAQSK

SEQ ID NO: 28 - protein, 94 aa, Artificial sequence
  synthetic sequence
DTRPRFLELRKSECHFFNGTERVRYLDRYFHNQEEFLRFDSDVGEYRAVTELGRPVAESWNSQKDLLEQKRGRVDNYCRHNYGVGESFTVQRRV

SEQ ID NO: 29 - protein, 103 aa, Artificial sequence
  synthetic sequence
HPQVTVYPAKTQPLQHHNLLVCSVSGFYPGSIEVRWFRNGQEEKAGVVSTGLIQNGDWTFQTLVMLETVPRSGEVYTCQVEHPSVTSALTVEWRARSESAQSK

SEQ ID NO: 30 - protein, 208 aa, Artificial sequence
  synthetic sequence
TVLSSPLALAGDTQPRFLEQAKCECHFLNGTERVWNLIRYIYNQEEYARYNSDLGEYQAVTELGRPDAEYWNSQKDLLERRRAEVDTYCRYNYGVVESFTVQRRVQPKVTVYPSKTQPLQHHNLLVCSVNGFYPGSIEVRWFRNGQEEKAGVVSTGLIQNGDWTFQTLVMLETVPRSGEVYTCQVEHPSMMSPLTVQWSARSESAQSK

SEQ ID NO: 31 - protein, 105 aa, Artificial sequence
  synthetic sequence
TVLSSPLALAGDTQPRFLEQAKCECHFLNGTERVWNLIRYIYNQEEYARYNSDLGEYQAVTELGRPDAEYWNSQKDLLERRRAEVDTYCRYNYGVVESFTVQRRV

SEQ ID NO: 32 - protein, 103 aa, Artificial sequence
  synthetic sequence
QPKVTVYPSKTQPLQHHNLLVCSVNGFYPGSIEVRWFRNGQEEKAGVVSTGLIQNGDWTFQTLVMLETVPRSGEVYTCQVEHPSMMSPLTVQWSARSESAQSK

SEQ ID NO: 33 - protein, 207 aa, Artificial sequence
  synthetic sequence
MVLSSPLALAGDTRPRFLQQDKYECHFFNGTERVRFLHRDIYNQEEDLRFDSDVGEYRAVTELGRPDAEYWNSQKDFLEDRRAAVDTYCRHNYGVGESFTVQRRVEPKVTVYPARTQTLQHHNLLVCSVNGFYPGSIEVRWFRNSQEEKAGVVSTGLIQNGDWTFQTLVMLETVPRSGEVYTCQVEHPSVTSPLTVEWRAQSESAQS

SEQ ID NO: 34 - protein, 105 aa, Artificial sequence
  synthetic sequence
MVLSSPLALAGDTRPRFLQQDKYECHFFNGTERVRFLHRDIYNQEEDLRFDSDVGEYRAVTELGRPDAEYWNSQKDFLEDRRAAVDTYCRHNYGVGESFTVQRRV

SEQ ID NO: 35 - protein, 102 aa, Artificial sequence
  synthetic sequence
EPKVTVYPARTQTLQHHNLLVCSVNGFYPGSIEVRWFRNSQEEKAGVVSTGLIQNGDWTFQTLVMLETVPRSGEVYTCQVEHPSVTSPLTVEWRAQSESAQS

SEQ ID NO: 36 - protein, 189 aa, Artificial sequence
  synthetic sequence
GGFVAHVESTCLLDDAGTPKDFTYCISFNKDLLTCWDPEENKMAPCEFGVLNSLANVLSQHLNQKDTLMQRLRNGLQNCATHTQPFWGSLTNRTRPPSVQVAKTTPFNTREPVMLACYVWGFYPAEVTITWRKNGKLVMPHSSAHKTAQPNGDWTYQTLSHLALTPSYGDTYTCVVEHTGAPEPILRDW

SEQ ID NO: 37 - protein, 94 aa, Artificial sequence
  synthetic sequence
GGFVAHVESTCLLDDAGTPKDFTYCISFNKDLLTCWDPEENKMAPCEFGVLNSLANVLSQHLNQKDTLMQRLRNGLQNCATHTQPFWGSLTNRT

SEQ ID NO: 38 - protein, 95 aa, Artificial sequence
  synthetic sequence
RPPSVQVAKTTPFNTREPVMLACYVWGFYPAEVTITWRKNGKLVMPHSSAHKTAQPNGDWTYQTLSHLALTPSYGDTYTCVVEHTGAPEPILRDW

SEQ ID NO: 39 - protein, 188 aa, Artificial sequence
  synthetic sequence
TDSPEDFVIQAKADCYFTNGTEKVQFVVRFIFNLEEYVRFDSDVGMFVALTKLGQPDAEQWNSRLDLLERSRQAVDGVCRHNYRLGAPFTVGRKVQPEVTVYPERTPLLHQHNLLHCSVTGFYPGDIKIKWFLNGQEERAGVMSTGPIRNGDWTFQTVVMLEMTPELGHVYTCLVDHSSLLSPVSVEW

SEQ ID NO: 40 - protein, 94 aa, Artificial sequence
  synthetic sequence
TDSPEDFVIQAKADCYFTNGTEKVQFVVRFIFNLEEYVRFDSDVGMFVALTKLGQPDAEQWNSRLDLLERSRQAVDGVCRHNYRLGAPFTVGRK

SEQ ID NO: 41 - protein, 94 aa, Artificial sequence
  synthetic sequence
VQPEVTVYPERTPLLHQHNLLHCSVTGFYPGDIKIKWFLNGQEERAGVMSTGPIRNGDWTFQTVVMLEMTPELGHVYTCLVDHSSLLSPVSVEW

SEQ ID NO: 42 - protein, 186 aa, Artificial sequence
  synthetic sequence
RATPENYLFQGRQECYAFNGTQRFLERYIYNREEFARFDSDVGEFRAVTELGRPAAEYWNSQKDILEEKRAVPDRMCRHNYELGGPMTLQRRVQPRVNVSPSKKGPLQHHNLLVCHVTDFYPGSIQVRWFLNGQEETAGVVSTNLIRNGDWTFQILVMLEMTPQQGDVYTCQVEHTSLDSPVTVEW

SEQ ID NO: 43 - protein, 92 aa, Artificial sequence
  synthetic sequence
RATPENYLFQGRQECYAFNGTQRFLERYIYNREEFARFDSDVGEFRAVTELGRPAAEYWNSQKDILEEKRAVPDRMCRHNYELGGPMTLQRR

SEQ ID NO: 44 - protein, 94 aa, Artificial sequence
  synthetic sequence
VQPRVNVSPSKKGPLQHHNLLVCHVTDFYPGSIQVRWFLNGQEETAGVVSTNLIRNGDWTFQILVMLEMTPQQGDVYTCQVEHTSLDSPVTVEW

SEQ ID NO: 45 - protein, 188 aa, Artificial sequence
  synthetic sequence
RDSPEDFVFQFKGMCYFTNGTERVRLVTRYIYNREEYARFDSDVGVYRAVTPQGRPDAEYWNSQKEVLEGTRAELDTVCRHNYEVAFRGILQRRVEPTVTISPSRTEALNHHNLLVCSVTDFYPGQIKVRWFRNDQEETAGVVSTPLIRNGDWTFQILVMLEMTPQRGDVYTCHVEHPSLQSPITVEW

SEQ ID NO: 46 - protein, 94 aa, Artificial sequence
  synthetic sequence
RDSPEDFVFQFKGMCYFTNGTERVRLVTRYIYNREEYARFDSDVGVYRAVTPQGRPDAEYWNSQKEVLEGTRAELDTVCRHNYEVAFRGILQRR

SEQ ID NO: 47 - protein, 94 aa, Artificial sequence
  synthetic sequence
VEPTVTISPSRTEALNHHNLLVCSVTDFYPGQIKVRWFRNDQEETAGVVSTPLIRNGDWTFQILVMLEMTPQRGDVYTCHVEHPSLQSPITVEW

SEQ ID NO: 48 - protein, 182 aa, Artificial sequence
  synthetic sequence
DFLVQFKGMCYFTNGTERVRGVARYIYNREEYGRFDSDVGEFQAVTELGRSIEDWNNYKDFLEQERAAVDKVCRHNYEAELRTTLQRQVEPTVTISPSRTEALNHHNLLVCSVTDFYPAQIKVRWFRNDQEETAGVVSTSLIRNGDWTFQILVMLEITPQRGDIYTCQVEHPSLQSPITVEW

SEQ ID NO: 49 - protein, 93 aa, Artificial sequence
  synthetic sequence
DFLVQFKGMCYFTNGTERVRGVARYIYNREEYGRFDSDVGEFQAVTELGRSIEDWNNYKDFLEQERAAVDKVCRHNYEAELRTTLQRQVEPTV

SEQ ID NO: 50 - protein, 89 aa, Artificial sequence
  synthetic sequence
TISPSRTEALNHHNLLVCSVTDFYPAQIKVRWFRNDQEETAGVVSTSLIRNGDWTFQILVMLEITPQRGDIYTCQVEHPSLQSPITVEW

SEQ ID NO: 51 - protein, 266 aa, Artificial sequence
  synthetic sequence
MVCLKLPGGSCMTALTVTLMVLSSPLALAGDTRPRFLWQLKFECHFFNGTERVRLLERCIYNQEESVRFDSDVGEYRAVTELGRPDAEYWNSQKDLLEQRRAAVDTYCRHNYGVGESFTVQRRVEPKVTVYPSKTQPLQHHNLLVCSVSGFYPGSIEVRWFRNGQEEKAGVVSTGLIQNGDWTFQTLVMLETVPRSGEVYTCQVEHPSVTSPLTVEWRARSESAQSKMLSGVGGFVLGLLFLGAGLFIYFRNQKGHSGLQPTGFLS

SEQ ID NO: 52 - protein, 266 aa, Artificial sequence [sequence omitted]

SEQ ID NO: 53 - protein, 266 aa, Artificial sequence [sequence omitted]

SEQ ID NO: 54 - protein, 266 aa, Artificial sequence [sequence omitted]

SEQ ID NO: 55 - protein, 266 aa, Artificial sequence [sequence omitted]

SEQ ID NO: 56 - protein, 266 aa, Artificial sequence [sequence omitted]

SEQ ID NO: 57 - protein, 266 aa, Artificial sequence [sequence omitted]

SEQ ID NO: 58 - protein, 266 aa, Artificial sequence [sequence omitted]

SEQ ID NO: 59 - protein, 5 aa, Artificial sequence
  synthetic sequence
  VARIANT (4)..(4): The amino acid at position 4 is any amino acid other than Pro.
VPGXG

SEQ ID NO: 60 - protein, 223 aa, Artificial sequence
  synthetic sequence
PPCPSCPAPEFLGGPSVFLFPPKPKDTLMISRTPEVTCVVVDVSQEDPEVQFNWYVDGVEVHNAKTKPREEQFNSTYRVVSVLTVLHQDWLNGKEYKCKVSNKGLPSSIEKTISKAKGQPREPQVYTLPPSQEEMTKNQVSLTCLVKGFYPSDIAVEWESNGQPENNYKTTPPVLDSDGSFFLYSRLTVDKSRWQEGNVFSCSVMHEALHNHYTQKSLSLSPG

SEQ ID NO: 61 - protein, 5 aa, Artificial sequence
  synthetic sequence
GSGGS

SEQ ID NO: 62 - protein, 4 aa, Artificial sequence
  synthetic sequence
GGGS

SEQ ID NO: 63 - protein, 4 aa, Artificial sequence
  synthetic sequence
GGSG

SEQ ID NO: 64 - protein, 5 aa, Artificial sequence
  synthetic sequence
GGSGG

SEQ ID NO: 65 - protein, 5 aa, Artificial sequence
  synthetic sequence
GSGSG

SEQ ID NO: 66 - protein, 5 aa, Artificial sequence
  synthetic sequence
GSGGG

SEQ ID NO: 67 - protein, 5 aa, Artificial sequence
  synthetic sequence
GGGSG

SEQ ID NO: 68 - protein, 5 aa, Artificial sequence
  synthetic sequence
GSSSG

SEQ ID NO: 69 - protein, 50 aa, Artificial sequence
  synthetic sequence
  VARIANT (6)..(50): Each copy of Gly Ser Ser Ser Ser at positions 6 to 50 may either be present or absent
GSSSSGSSSSGSSSSGSSSSGSSSSGSSSSGSSSSGSSSSGSSSSGSSSS

SEQ ID NO: 70 - protein, 5 aa, Artificial sequence
  synthetic sequence
AAAGG

SEQ ID NO: 71 - protein, 15 aa, Artificial sequence
  synthetic sequence
GCGASGGGGSGGGGS

SEQ ID NO: 72 - protein, 266 aa, Artificial sequence [sequence omitted]

SEQ ID NO: 73 - protein, 266 aa, Artificial sequence [sequence omitted]

SEQ ID NO: 74 - protein, 266 aa, Artificial sequence [sequence omitted]

SEQ ID NO: 75 - protein, 266 aa, Artificial sequence [sequence omitted]

SEQ ID NO: 76 - protein, 266 aa, Artificial sequence [sequence omitted]

SEQ ID NO: 77 - protein, 266 aa, Artificial sequence [sequence omitted]

SEQ ID NO: 78 - protein, 266 aa, Artificial sequence [sequence omitted]

SEQ ID NO: 79 - protein, 266 aa, Artificial sequence
  synthetic sequence
MVCLRLPGGSCMAVLTVTLMVLSSPLALAGDTRPRFLEYSTSECHFFNGTERVRFLDRYFYNQEEYVRFDSDVGEFRAVTELGRPDEEYWNSQKDFLEDERAAVDTYCRHNYGVVESFTVQRRVHPKVTVYPSKTQPLQHHNLLVCSVSGFYPGSIEVRWFRNGQEEKTGVVSTGLIHNGDWTFQTLVMLETVPRSGEVYTCQVEHPSVTSPLTVEWRARSESAQSKMLSGVGGFVLGLLFLGAGLFIYFRNQKGHSGLQPRGFLS

SEQ ID NO: 80 - protein, 266 aa, Artificial sequence [sequence omitted]

SEQ ID NO: 81 - protein, 266 aa, Artificial sequence [sequence omitted]

SEQ ID NO: 82 - protein, 266 aa, Artificial sequence [sequence omitted]

SEQ ID NO: 83 - protein, 266 aa, Artificial sequence [sequence omitted]

SEQ ID NO: 84 - protein, 266 aa, Artificial sequence [sequence omitted]

SEQ ID NO: 85 - protein, 266 aa, Artificial sequence [sequence omitted]

SEQ ID NO: 86 - protein, 266 aa, Artificial sequence [sequence omitted]

SEQ ID NO: 87 - protein, 266 aa, Artificial sequence [sequence omitted]

SEQ ID NO: 88 - protein, 266 aa, Artificial sequence [sequence omitted]

SEQ ID NO: 89 - protein, 266 aa, Artificial sequence [sequence omitted]

SEQ ID NO: 90 - protein, 266 aa, Artificial sequence
  synthetic sequence
MVCLKLPGGSCMTALTVTLMVLSSPLALSGDTRPRFLWQPKRECHFFNGTERVRFLDRYFYNQEESVRFDSDVGEFRAVTELGRPDAEYWNSQKDILEQARAAVDTYCRHNYGVVESFTVQRRVQPKVTVYPSKTQPLQHHNLLVCSVSGFYPGSIEVRWFLNGQEEKAGMVSTGLIQNGDWTFQTLVMLETVPRSGEVYTCQVEHPSVTSPLTVEWRARSESAQSKMLSGVGGFVLGLLFLGAGLFIYFRNQKGHSGLQPTGFLS

SEQ ID NO: 91 - protein, 266 aa, Artificial sequence [sequence omitted]

SEQ ID NO: 92 - protein, 266 aa, Artificial sequence
  synthetic sequence
MVCLKLPGGSSLAALTVTLMVLSSRLAFAGDTRPRFLELRKSECHFFNGTERVRYLDRYFHNQEEFLRFDSDVGEYRAVTELGRPVAESWNSQKDLLEQKRGRVDNYCRHNYGVGESFTVQRRVHPQVTVYPAKTQPLQHHNLLVCSVSGFYPGSIEVRWFRNGQEEKAGVVSTGLIQNGDWTFQTLVMLETVPRSGEVYTCQVEHPSVTSALTVEWRARSESAQSKMLSGVGGFVLGLLFLGAGLFIYFRNQKGHSGLQPTGFLS

SEQ ID NO: 93 - protein, 266 aa, Artificial sequence [sequence omitted]

SEQ ID NO: 94 - protein, 266 aa, Artificial sequence
  synthetic sequence
MVCLKLPGGSCMAALTVTLTVLSSPLALAGDTQPRFLEQAKCECHFLNGTERVWNLIRYIYNQEEYARYNSDLGEYQAVTELGRPDAEYWNSQKDLLERRRAEVDTYCRYNYGVVESFTVQRRVQPKVTVYPSKTQPLQHHNLLVCSVNGFYPGSIEVRWFRNSQEEKAGVVSTGLIQNGDWTFQTLVMLETVPRSGEVYTCQVEHPSMMSPLTVQWSARSESAQSKMLSGVGGFVLGLLFLGTGLFIYFRNQKGHSGLQPTGLLS

SEQ ID NO: 95 - protein, 247 aa, Artificial sequence
  synthetic sequence
MVLSSPLALAGDTRPRFLQQDKYECHFFNGTERVRFLHRDIYNQEEDLRFDSDVGEYRAVTELGRPDAEYWNSQKDFLEDRRAAVDTYCRHNYGVGESFTVQRRVEPKVTVYPARTQTLQHHNLLVCSVNGFYPGSIEVRWFRNSQEEKAGVVSTGLIQNGDWTFQTLVMLETVPRSGEVYTCQVEHPSVTSPLTVEWRAQSESAQSKMLSGVGGFVLGLLFLGAGLFIYFKNQKGHSGLHPTGLVS

SEQ ID NO: 96 - protein, 261 aa, Artificial sequence
  synthetic sequence
MSWKKALRIPGGLRAATVTLMLSMLSTPVAEGRDSPEDFVYQFKGMCYFTNGTERVRLVSRSIYNREEIVRFDSDVGEFRAVTLLGLPAAEYWNSQKDILERKRAAVDRVCRHNYQLELRTTLQRRVEPTVTISPSRTEALNHHNLLVCSVTDFYPAQIKVRWFRNDQEETAGVVSTPLIRNGDWTFQILVMLEMTPQRGDVYTCHVEHPSLQSPITVEWRAQSESAQSKMLSGIGGFVLGLIFLGLGLIIHHRSQKGLLH

SEQ ID NO: 97 - protein, 261 aa, Artificial sequence
  synthetic sequence
MSWKKALRIPGGLRAATVTLMLSMLSTPVAEGRDSPEDFVYQFKGMCYFTNGTERVRLVSRSIYNREEIVRFDSDVGEFRAVTLLGLPAAEYWNSQKDILERKRAAVDRVCRHNYQLELRTTLQRRVEPTVTISPSRTEALNHHNLLVCSVTDFYPAQIKVRWFRNGQEETAGVVSTPLIRNGDWTFQILVMLEMTPQRGDVYTCHVEHPSLQSPITVEWRAQSESAQSKMLSGIGGFVLGLIFLGLGLIIHHRSQKGLLH

SEQ ID NO: 98 - protein, 261 aa, Artificial sequence
  synthetic sequence
MSWKKALRIPGGLRAATVTLMLAMLSTPVAEGRDSPEDFVYQFKAMCYFTNGTERVRYVTRYIYNREEYARFDSDVEVYRAVTPLGPPDAEYWNSQKEVLERTRAELDTVCRHNYQLELRTTLQRRVEPTVTISPSRTEALNHHNLLVCSVTDFYPAQIKVRWFRNDQEETTGVVSTPLIRNGDWTFQILVMLEMTPQHGDVYTCHVEHPSLQNPITVEWRAQSESAQSKMLSGIGGFVLGLIFLGLGLIIHHRSQKGLLH

SEQ ID NO: 99 - protein, 261 aa, Artificial sequence [sequence omitted]

SEQ ID NO: 100 - protein, 261 aa, Artificial sequence [sequence omitted]

SEQ ID NO: 101 - protein, 261 aa, Artificial sequence [sequence omitted]

SEQ ID NO: 102 - protein, 261 aa, Artificial sequence [sequence omitted]

SEQ ID NO: 103 - protein, 245 aa, Homo sapiens
MRIFAVFIFMTYWHLLNAFTVTVPKDLYVVEYGSNMTIECKFPVEKQLDLAALIVYWEMEDKNIIQFVHGEEDLKVQHSSYRQRARLLKDQLSLGNAALQITDVKLQDAGVYRCMISYGGADYKRITVKVNAPYNKINQRILVVDPVTSEHELTCQAEGYPKAEVIWTSSDHQVLSGKTTTTNSKREEKLFNVTSTLRINTTTNEIFYCTFRRLDPEENHTAELVIPGNILNVSIKICLTLSPST

SEQ ID NO: 104 - protein, 219 aa, Homo sapiens
FTVTVPKDLYVVEYGSNMTIECKFPVEKQLDLAALIVYWEMEDKNIIQFVHGEEDLKVQHSSYRQRARLLKDQLSLGNAALQITDVKLQDAGVYRCMISYGGADYKRITVKVNAPYNKINQRILVVDPVTSEHELTCQAEGYPKAEVIWTSSDHQVLSGKTTTTNSKREEKLFNVTSTLRINTTTNEIFYCTFRRLDPEENHTAELVIPGNILNVSIKI

SEQ ID NO: 105 - protein, 268 aa, Homo sapiens
PGWFLDSPDRPWNPPTFSPALLVVTEGDNATFTCSFSNTSESFVLNWYRMSPSNQTDKLAAFPEDRSQPGQDCRFRVTQLPNGRDFHMSVVRARRNDSGTYLCGAISLAPKAQIKESLRAELRVTERRAEVPTAHPSPSPRPAGQFQTLVVGVVGGLLGSLVLLVWVLAVICSRAARGTIGARRTGQPLKEDPSAVPVFSVDYGELDFQWREKTPEPPVPCVPEQTEYATIVFPSGMGTSSPARRGSADGPRSAQPLRPEDGHCSWPL

SEQ ID NO: 106 - protein, 219 aa, Artificial sequence
  synthetic sequence
  VARIANT (8)..(8): The amino acid at position 8  is any amino acid other than Ile. In some cases, it is Asp.
FTVTVPKXLYVVEYGSNMTIECKFPVEKQLDLAALIVYWEMEDKNIIQFVHGEEDLKVQHSSYRQRARLLKDQLSLGNAALQITDVKLQDAGVYRCMISYGGADYKRITVKVNAPYNKINQRILVVDPVTSEHELTCQAEGYPKAEVIWTSSDHQVLSGKTTTTNSKREEKLFNVTSTLRINTTTNEIFYCTFRRLDPEENHTAELVIPGNILNVSIKI

SEQ ID NO: 107 - protein, 219 aa, Artificial sequence
  synthetic sequence
  VARIANT (36)..(36): The amino acid at position 36 is any amino acid other than Ile. In some cases, it is Asp.
FTVTVPKDLYVVEYGSNMTIECKFPVEKQLDLAALXVYWEMEDKNIIQFVHGEEDLKVQHSSYRQRARLLKDQLSLGNAALQITDVKLQDAGVYRCMISYGGADYKRITVKVNAPYNKINQRILVVDPVTSEHELTCQAEGYPKAEVIWTSSDHQVLSGKTTTTNSKREEKLFNVTSTLRINTTTNEIFYCTFRRLDPEENHTAELVIPGNILNVSIKI

SEQ ID NO: 108 - protein, 219 aa, Artificial sequence
  synthetic sequence
  VARIANT (54)..(54): The amino acid at position 54 is any amino acid other than Glu. In some cases, it is Arg.
FTVTVPKDLYVVEYGSNMTIECKFPVEKQLDLAALIVYWEMEDKNIIQFVHGEXDLKVQHSSYRQRARLLKDQLSLGNAALQITDVKLQDAGVYRCMISYGGADYKRITVKVNAPYNKINQRILVVDPVTSEHELTCQAEGYPKAEVIWTSSDHQVLSGKTTTTNSKREEKLFNVTSTLRINTTTNEIFYCTFRRLDPEENHTAELVIPGNILNVSIKI

SEQ ID NO: 109 - protein, 208 aa, Homo sapiens [sequence omitted]

SEQ ID NO: 110 - protein, 220 aa, Homo sapiens
MLRLLLALNLFPSIQVTGNKILVKQSPMLVAYDNAVNLSCKYSYNLFSREFRASLHKGLDSAVEVCVVYGNYSQQLQVYSKTGFNCDGKLGNESVTFYLQNLYVNQTDIYFCKIEVMYPPPYLDNEKSNGTIIHVKGKHLCPSPLFPGPSKPFWVLVVVGGVLACYSLLVTVAFIIFWVRSKRSRLLHSDYMNMTPRRPGPTRKHYQPYAPPRDFAAYRS

SEQ ID NO: 111 - protein, 123 aa, Homo sapiens
MLRLLLALNLFPSIQVTGNKILVKQSPMLVAYDNAVNLSWKHLCPSPLFPGPSKPFWVLVVVGGVLACYSLLVTVAFIIFWVRSKRSRLLHSDYMNMTPRRPGPTRKHYQPYAPPRDFAAYRS

SEQ ID NO: 112 - protein, 101 aa, Homo sapiens
MLRLLLALNLFPSIQVTGKHLCPSPLFPGPSKPFWVLVVVGGVLACYSLLVTVAFIIFWVRSKRSRLLHSDYMNMTPRRPGPTRKHYQPYAPPRDFAAYRS

SEQ ID NO: 113 - protein, 208 aa, Artificial sequence
  synthetic sequence
  VARIANT (19)..(19): The amino acid at position 19 is any amino acid other than Asn. In some cases, it is Ala.
VIHVTKEVKEVATLSCGHXVSVEELAQTRIYWQKEKKMVLTMMSGDMNIWPEYKNRTIFDITNNLSIVILALRPSDEGTYECVVLKYEKDAFKREHLAEVTLSVKADFPTPSISDFEIPTSNIRRIICSTSGGFPEPHLSWLENGEELNAINTTVSQDPETELYAVSSKLDFNMTTNHSFMCLIKYGHLRVNQTFNWNTTKQEHFPDN

SEQ ID NO: 114 - protein, 208 aa, Artificial sequence
  synthetic sequence
  VARIANT (63)..(63): The amino acid at position 63 is any amino acid other than Asn. In some cases, it is Ala.
VIHVTKEVKEVATLSCGHNVSVEELAQTRIYWQKEKKMVLTMMSGDMNIWPEYKNRTIFDITXNLSIVILALRPSDEGTYECVVLKYEKDAFKREHLAEVTLSVKADFPTPSISDFEIPTSNIRRIICSTSGGFPEPHLSWLENGEELNAINTTVSQDPETELYAVSSKLDFNMTTNHSFMCLIKYGHLRVNQTFNWNTTKQEHFPDN

SEQ ID NO: 115 - protein, 208 aa, Artificial sequence
  synthetic sequence
  VARIANT (67)..(67): The amino acid at position 67 is any amino acid other than Ile. In some cases, it is Ala.
VIHVTKEVKEVATLSCGHNVSVEELAQTRIYWQKEKKMVLTMMSGDMNIWPEYKNRTIFDITNNLSXVILALRPSDEGTYECVVLKYEKDAFKREHLAEVTLSVKADFPTPSISDFEIPTSNIRRIICSTSGGFPEPHLSWLENGEELNAINTTVSQDPETELYAVSSKLDFNMTTNHSFMCLIKYGHLRVNQTFNWNTTKQEHFPDN

SEQ ID NO: 116 - protein, 208 aa, Artificial sequence
  synthetic sequence
  VARIANT (86)..(86): The amino acid at position 86 is any amino acid other than Lys. In some cases, it is Ala.
VIHVTKEVKEVATLSCGHNVSVEELAQTRIYWQKEKKMVLTMMSGDMNIWPEYKNRTIFDITNNLSIVILALRPSDEGTYECVVLXYEKDAFKREHLAEVTLSVKADFPTPSISDFEIPTSNIRRIICSTSGGFPEPHLSWLENGEELNAINTTVSQDPETELYAVSSKLDFNMTTNHSFMCLIKYGHLRVNQTFNWNTTKQEHFPDN

SEQ ID NO: 117 - protein, 208 aa, Artificial sequence
  synthetic sequence
  VARIANT (157)..(157): The amino acid at position 157 is any amino acid other than Gln. In some cases, it is Ala.
VIHVTKEVKEVATLSCGHNVSVEELAQTRIYWQKEKKMVLTMMSGDMNIWPEYKNRTIFDITNNLSIVILALRPSDEGTYECVVLKYEKDAFKREHLAEVTLSVKADFPTPSISDFEIPTSNIRRIICSTSGGFPEPHLSWLENGEELNAINTTVSXDPETELYAVSSKLDFNMTTNHSFMCLIKYGHLRVNQTFNWNTTKQEHFPDN

SEQ ID NO: 118 - protein, 208 aa, Artificial sequence
  synthetic sequence
  VARIANT (158)..(158): The amino acid at position 158 is any amino acid other than Asp. In some cases, it is Ala.
VIHVTKEVKEVATLSCGHNVSVEELAQTRIYWQKEKKMVLTMMSGDMNIWPEYKNRTIFDITNNLSIVILALRPSDEGTYECVVLKYEKDAFKREHLAEVTLSVKADFPTPSISDFEIPTSNIRRIICSTSGGFPEPHLSWLENGEELNAINTTVSQXPETELYAVSSKLDFNMTTNHSFMCLIKYGHLRVNQTFNWNTTKQEHFPDN

SEQ ID NO: 119 - protein, 208 aa, Artificial sequence
  synthetic sequence
  VARIANT (25)..(25): The amino acid at position 25 is any amino acid other than Leu. In some cases, it is Ala.
VIHVTKEVKEVATLSCGHNVSVEEXAQTRIYWQKEKKMVLTMMSGDMNIWPEYKNRTIFDITNNLSIVILALRPSDEGTYECVVLKYEKDAFKREHLAEVTLSVKADFPTPSISDFEIPTSNIRRIICSTSGGFPEPHLSWLENGEELNAINTTVSQDPETELYAVSSKLDFNMTTNHSFMCLIKYGHLRVNQTFNWNTTKQEHFPDN

SEQ ID NO: 120 - protein, 208 aa, Artificial sequence
  synthetic sequence
  VARIANT (31)..(31): The amino acid at position 31 is any amino acid other than Tyr. In some cases, it is Ala.
VIHVTKEVKEVATLSCGHNVSVEELAQTRIXWQKEKKMVLTMMSGDMNIWPEYKNRTIFDITNNLSIVILALRPSDEGTYECVVLKYEKDAFKREHLAEVTLSVKADFPTPSISDFEIPTSNIRRIICSTSGGFPEPHLSWLENGEELNAINTTVSQDPETELYAVSSKLDFNMTTNHSFMCLIKYGHLRVNQTFNWNTTKQEHFPDN

SEQ ID NO: 121 - protein, 208 aa, Artificial sequence
  synthetic sequence
  VARIANT (33)..(33): The amino acid at position 33 is any amino acid other than Gln. In some cases, it is Ala.
VIHVTKEVKEVATLSCGHNVSVEELAQTRIYWXKEKKMVLTMMSGDMNIWPEYKNRTIFDITNNLSIVILALRPSDEGTYECVVLKYEKDAFKREHLAEVTLSVKADFPTPSISDFEIPTSNIRRIICSTSGGFPEPHLSWLENGEELNAINTTVSQDPETELYAVSSKLDFNMTTNHSFMCLIKYGHLRVNQTFNWNTTKQEHFPDN

SEQ ID NO: 122 - protein, 208 aa, Artificial sequence
  synthetic sequence
  VARIANT (38)..(38): The amino acid at position 38 is any amino acid other than Met. In some cases, it is Ala.
VIHVTKEVKEVATLSCGHNVSVEELAQTRIYWQKEKKXVLTMMSGDMNIWPEYKNRTIFDITNNLSIVILALRPSDEGTYECVVLKYEKDAFKREHLAEVTLSVKADFPTPSISDFEIPTSNIRRIICSTSGGFPEPHLSWLENGEELNAINTTVSQDPETELYAVSSKLDFNMTTNHSFMCLIKYGHLRVNQTFNWNTTKQEHFPDN

SEQ ID NO: 123 - protein, 208 aa, Artificial sequence
  synthetic sequence
  VARIANT (39)..(39): The amino acid at position 39 is any amino acid other than Val. In some cases, it is Ala.
VIHVTKEVKEVATLSCGHNVSVEELAQTRIYWQKEKKMXLTMMSGDMNIWPEYKNRTIFDITNNLSIVILALRPSDEGTYECVVLKYEKDAFKREHLAEVTLSVKADFPTPSISDFEIPTSNIRRIICSTSGGFPEPHLSWLENGEELNAINTTVSQDPETELYAVSSKLDFNMTTNHSFMCLIKYGHLRVNQTFNWNTTKQEHFPDN

SEQ ID NO: 124 - protein, 208 aa, Artificial sequence
  synthetic sequence
  VARIANT (49)..(49): The amino acid at position 49 is any amino acid other than Ile. In some cases, it is Ala.
VIHVTKEVKEVATLSCGHNVSVEELAQTRIYWQKEKKMVLTMMSGDMNXWPEYKNRTIFDITNNLSIVILALRPSDEGTYECVVLKYEKDAFKREHLAEVTLSVKADFPTPSISDFEIPTSNIRRIICSTSGGFPEPHLSWLENGEELNAINTTVSQDPETELYAVSSKLDFNMTTNHSFMCLIKYGHLRVNQTFNWNTTKQEHFPDN

SEQ ID NO: 125 - protein, 208 aa, Artificial sequence
  synthetic sequence
  VARIANT (53)..(53): The amino acid at position 53 is any amino acid other than Tyr. In some cases, it is Ala.
VIHVTKEVKEVATLSCGHNVSVEELAQTRIYWQKEKKMVLTMMSGDMNIWPEXKNRTIFDITNNLSIVILALRPSDEGTYECVVLKYEKDAFKREHLAEVTLSVKADFPTPSISDFEIPTSNIRRIICSTSGGFPEPHLSWLENGEELNAINTTVSQDPETELYAVSSKLDFNMTTNHSFMCLIKYGHLRVNQTFNWNTTKQEHFPDN

SEQ ID NO: 126 - protein, 208 aa, Artificial sequence
  synthetic sequence
  VARIANT (60)..(60): The amino acid at position 60 is any amino acid other than Asp. In some cases, it is Ala.
VIHVTKEVKEVATLSCGHNVSVEELAQTRIYWQKEKKMVLTMMSGDMNIWPEYKNRTIFXITNNLSIVILALRPSDEGTYECVVLKYEKDAFKREHLAEVTLSVKADFPTPSISDFEIPTSNIRRIICSTSGGFPEPHLSWLENGEELNAINTTVSQDPETELYAVSSKLDFNMTTNHSFMCLIKYGHLRVNQTFNWNTTKQEHFPDN

SEQ ID NO: 127 - protein, 208 aa, Artificial sequence
  synthetic sequence
  VARIANT (108)..(108): The amino acid at position 108 is any amino acid other than Phe. In some cases, it is Ala.
VIHVTKEVKEVATLSCGHNVSVEELAQTRIYWQKEKKMVLTMMSGDMNIWPEYKNRTIFDITNNLSIVILALRPSDEGTYECVVLKYEKDAFKREHLAEVTLSVKADXPTPSISDFEIPTSNIRRIICSTSGGFPEPHLSWLENGEELNAINTTVSQDPETELYAVSSKLDFNMTTNHSFMCLIKYGHLRVNQTFNWNTTKQEHFPDN

SEQ ID NO: 128 - protein, 208 aa, Artificial sequence
  synthetic sequence
  VARIANT (156)..(156): The amino acid at position 156 is any amino acid other than Ser. In some cases, it is Ala.
VIHVTKEVKEVATLSCGHNVSVEELAQTRIYWQKEKKMVLTMMSGDMNIWPEYKNRTIFDITNNLSIVILALRPSDEGTYECVVLKYEKDAFKREHLAEVTLSVKADFPTPSISDFEIPTSNIRRIICSTSGGFPEPHLSWLENGEELNAINTTVXQDPETELYAVSSKLDFNMTTNHSFMCLIKYGHLRVNQTFNWNTTKQEHFPDN

SEQ ID NO: 129 - protein, 208 aa, Artificial sequence
  synthetic sequence
  VARIANT (111)..(111): The amino acid at position 111 is any amino acid other than Pro. In some cases, it is Ala.
VIHVTKEVKEVATLSCGHNVSVEELAQTRIYWQKEKKMVLTMMSGDMNIWPEYKNRTIFDITNNLSIVILALRPSDEGTYECVVLKYEKDAFKREHLAEVTLSVKADFPTXSISDFEIPTSNIRRIICSTSGGFPEPHLSWLENGEELNAINTTVSQDPETELYAVSSKLDFNMTTNHSFMCLIKYGHLRVNQTFNWNTTKQEHFPDN

SEQ ID NO: 130 - protein, 224 aa, Homo sapiens
APLKIQAYFNETADLPCQFANSQNQSLSELVVFWQDQENLVLNEVYLGKEKFDSVHSKYMNRTSFDSDSWTLRLHNLQIKDKGLYQCIIHHKKPTGMIRIHQMNSELSVLANFSQPEIVPISNITENVYINLTCSSIHGYPEPKKMSVLLRTKNSTIEYDGIMQKSQDNVTELYDVSISLSVSFPDVTSNMTIFCILETDKTRLLSSPFSIELEDPQPPPDHIP

SEQ ID NO: 131 - protein, 110 aa, Homo sapiens
APLKIQAYFNETADLPCQFANSQNQSLSELVVFWQDQENLVLNEVYLGKEKFDSVHSKYMNRTSFDSDSWTLRLHNLQIKDKGLYQCIIHHKKPTGMIRIHQMNSELSVL

SEQ ID NO: 132 - protein, 224 aa, Artificial sequence
  synthetic sequence
  VARIANT (61)..(61): The amino acid at position 61 is any amino acid other than Asn. In some cases, it is Ala.
APLKIQAYFNETADLPCQFANSQNQSLSELVVFWQDQENLVLNEVYLGKEKFDSVHSKYMXRTSFDSDSWTLRLHNLQIKDKGLYQCIIHHKKPTGMIRIHQMNSELSVLANFSQPEIVPISNITENVYINLTCSSIHGYPEPKKMSVLLRTKNSTIEYDGIMQKSQDNVTELYDVSISLSVSFPDVTSNMTIFCILETDKTRLLSSPFSIELEDPQPPPDHIP

SEQ ID NO: 133 - protein, 224 aa, Artificial sequence
  synthetic sequence
  VARIANT (66)..(66): The amino acid at position 66 is any amino acid other than Asp. In some cases, it is Ala.
APLKIQAYFNETADLPCQFANSQNQSLSELVVFWQDQENLVLNEVYLGKEKFDSVHSKYMNRTSFXSDSWTLRLHNLQIKDKGLYQCIIHHKKPTGMIRIHQMNSELSVLANFSQPEIVPISNITENVYINLTCSSIHGYPEPKKMSVLLRTKNSTIEYDGIMQKSQDNVTELYDVSISLSVSFPDVTSNMTIFCILETDKTRLLSSPFSIELEDPQPPPDHIP

SEQ ID NO: 134 - protein, 224 aa, Artificial sequence
  synthetic sequence
  VARIANT (70)..(70): The amino acid at position 70 is any amino acid other than Trp. In some cases, it is Ala.
APLKIQAYFNETADLPCQFANSQNQSLSELVVFWQDQENLVLNEVYLGKEKFDSVHSKYMNRTSFDSDSXTLRLHNLQIKDKGLYQCIIHHKKPTGMIRIHQMNSELSVLANFSQPEIVPISNITENVYINLTCSSIHGYPEPKKMSVLLRTKNSTIEYDGIMQKSQDNVTELYDVSISLSVSFPDVTSNMTIFCILETDKTRLLSSPFSIELEDPQPPPDHIP

SEQ ID NO: 135 - protein, 224 aa, Artificial sequence
  synthetic sequence
  VARIANT (91)..(91): The amino acid at position 91 is any amino acid other than His. In some cases, it is Ala.
APLKIQAYFNETADLPCQFANSQNQSLSELVVFWQDQENLVLNEVYLGKEKFDSVHSKYMNRTSFDSDSWTLRLHNLQIKDKGLYQCIIHXKKPTGMIRIHQMNSELSVLANFSQPEIVPISNITENVYINLTCSSIHGYPEPKKMSVLLRTKNSTIEYDGIMQKSQDNVTELYDVSISLSVSFPDVTSNMTIFCILETDKTRLLSSPFSIELEDPQPPPDHIP

SEQ ID NO: 136 - protein, 110 aa, Artificial sequence
  synthetic sequence
  VARIANT (61)..(61): The amino acid at position 61 is any amino acid other than Asn. In some cases, it is Ala.
APLKIQAYFNETADLPCQFANSQNQSLSELVVFWQDQENLVLNEVYLGKEKFDSVHSKYMXRTSFDSDSWTLRLHNLQIKDKGLYQCIIHHKKPTGMIRIHQMNSELSVL

SEQ ID NO: 137 - protein, 110 aa, Artificial sequence
  synthetic sequence
  VARIANT (66)..(66): The amino acid at position 66 is any amino acid other than Asp. In some cases, it is Ala.
APLKIQAYFNETADLPCQFANSQNQSLSELVVFWQDQENLVLNEVYLGKEKFDSVHSKYMNRTSFXSDSWTLRLHNLQIKDKGLYQCIIHHKKPTGMIRIHQMNSELSVL

SEQ ID NO: 138 - protein, 110 aa, Artificial sequence
  synthetic sequence
  VARIANT (70)..(70): The amino acid at position 70 is any amino acid other than Trp. In some cases, it is Ala.
APLKIQAYFNETADLPCQFANSQNQSLSELVVFWQDQENLVLNEVYLGKEKFDSVHSKYMNRTSFDSDSXTLRLHNLQIKDKGLYQCIIHHKKPTGMIRIHQMNSELSVL

SEQ ID NO: 139 - protein, 110 aa, Artificial sequence
  synthetic sequence
  VARIANT (91)..(91): The amino acid at position 91 is any amino acid other than His. In some cases, it is Ala.
APLKIQAYFNETADLPCQFANSQNQSLSELVVFWQDQENLVLNEVYLGKEKFDSVHSKYMNRTSFDSDSWTLRLHNLQIKDKGLYQCIIHXKKPTGMIRIHQMNSELSVL

SEQ ID NO: 140 - protein, 224 aa, Artificial sequence
  synthetic sequence
  VARIANT (41)..(41): The amino acid at position 41 is any amino acid other than Val. In some cases, it is Ala.
APLKIQAYFNETADLPCQFANSQNQSLSELVVFWQDQENLXLNEVYLGKEKFDSVHSKYMNRTSFDSDSWTLRLHNLQIKDKGLYQCIIHHKKPTGMIRIHQMNSELSVLANFSQPEIVPISNITENVYINLTCSSIHGYPEPKKMSVLLRTKNSTIEYDGIMQKSQDNVTELYDVSISLSVSFPDVTSNMTIFCILETDKTRLLSSPFSIELEDPQPPPDHIP

SEQ ID NO: 141 - protein, 110 aa, Artificial sequence
  synthetic sequence
  VARIANT (41)..(41): The amino acid at position 41 is any amino acid other than Val. In some cases, it is Ala.
APLKIQAYFNETADLPCQFANSQNQSLSELVVFWQDQENLXLNEVYLGKEKFDSVHSKYMNRTSFDSDSWTLRLHNLQIKDKGLYQCIIHHKKPTGMIRIHQMNSELSVL

SEQ ID NO: 142 - protein, 224 aa, Artificial sequence
  synthetic sequence
  VARIANT (35)..(35): The amino acid at position 35 is any amino acid other than Gln. In some cases, it is Ala.
APLKIQAYFNETADLPCQFANSQNQSLSELVVFWXDQENLVLNEVYLGKEKFDSVHSKYMNRTSFDSDSWTLRLHNLQIKDKGLYQCIIHHKKPTGMIRIHQMNSELSVLANFSQPEIVPISNITENVYINLTCSSIHGYPEPKKMSVLLRTKNSTIEYDGIMQKSQDNVTELYDVSISLSVSFPDVTSNMTIFCILETDKTRLLSSPFSIELEDPQPPPDHIP

SEQ ID NO: 143 - protein, 110 aa, Artificial sequence
  synthetic sequence
  VARIANT (35)..(35): The amino acid at position 35 is any amino acid other than Gln. In some cases, it is Ala.
APLKIQAYFNETADLPCQFANSQNQSLSELVVFWXDQENLVLNEVYLGKEKFDSVHSKYMNRTSFDSDSWTLRLHNLQIKDKGLYQCIIHHKKPTGMIRIHQMNSELSVL

SEQ ID NO: 144 - protein, 224 aa, Artificial sequence
  synthetic sequence
  VARIANT (33)..(33): The amino acid at paragraph 33 is any amino acid other than Phe. In some cases, it is Ala.
APLKIQAYFNETADLPCQFANSQNQSLSELVVXWQDQENLVLNEVYLGKEKFDSVHSKYMNRTSFDSDSWTLRLHNLQIKDKGLYQCIIHHKKPTGMIRIHQMNSELSVLANFSQPEIVPISNITENVYINLTCSSIHGYPEPKKMSVLLRTKNSTIEYDGIMQKSQDNVTELYDVSISLSVSFPDVTSNMTIFCILETDKTRLLSSPFSIELEDPQPPPDHIP

SEQ ID NO: 145 - protein, 110 aa, Artificial sequence
  synthetic sequence
  VARIANT (33)..(33): The amino acid at position 33 is any amino acid other than Phe. In some cases, it is Ala.
APLKIQAYFNETADLPCQFANSQNQSLSELVVXWQDQENLVLNEVYLGKEKFDSVHSKYMNRTSFDSDSWTLRLHNLQIKDKGLYQCIIHHKKPTGMIRIHQMNSELSVL

SEQ ID NO: 146 - protein, 224 aa, Artificial sequence
  synthetic sequence
  VARIANT (72)..(72): The amino acid at position 72 is any amino acid other than Leu. In some cases, it is Ala.
APLKIQAYFNETADLPCQFANSQNQSLSELVVFWQDQENLVLNEVYLGKEKFDSVHSKYMNRTSFDSDSWTXRLHNLQIKDKGLYQCIIHHKKPTGMIRIHQMNSELSVLANFSQPEIVPISNITENVYINLTCSSIHGYPEPKKMSVLLRTKNSTIEYDGIMQKSQDNVTELYDVSISLSVSFPDVTSNMTIFCILETDKTRLLSSPFSIELEDPQPPPDHIP

SEQ ID NO: 147 - protein, 110 aa, Artificial sequence
  synthetic sequence
  VARIANT (72)..(72): The amino acid at position 72 is any amino acid other than Leu. In some cases, it is Ala.
APLKIQAYFNETADLPCQFANSQNQSLSELVVFWQDQENLVLNEVYLGKEKFDSVHSKYMNRTSFDSDSWTXRLHNLQIKDKGLYQCIIHHKKPTGMIRIHQMNSELSVL

SEQ ID NO: 148 - protein, 224 aa, Artificial sequence
  synthetic sequence
  VARIANT (59)..(59): The amino acid at position 59 is any amino acid other than Tyr. In some cases, it is Ala.
APLKIQAYFNETADLPCQFANSQNQSLSELVVFWQDQENLVLNEVYLGKEKFDSVHSKXMNRTSFDSDSWTLRLHNLQIKDKGLYQCIIHHKKPTGMIRIHQMNSELSVLANFSQPEIVPISNITENVYINLTCSSIHGYPEPKKMSVLLRTKNSTIEYDGIMQKSQDNVTELYDVSISLSVSFPDVTSNMTIFCILETDKTRLLSSPFSIELEDPQPPPDHIP

SEQ ID NO: 149 - protein, 110 aa, Artificial sequence
  synthetic sequence
  VARIANT (59)..(59): The amino acid at position 59 is any amino acid other than Tyr. In some cases, it is Ala.
APLKIQAYFNETADLPCQFANSQNQSLSELVVFWQDQENLVLNEVYLGKEKFDSVHSKXMNRTSFDSDSWTLRLHNLQIKDKGLYQCIIHHKKPTGMIRIHQMNSELSVL

SEQ ID NO: 150 - protein, 224 aa, Artificial sequence
  synthetic sequence
  VARIANT (61)..(61): The amino acid at position 61 is any amino acid other than Asn. In some cases, it is Ala.
  VARIANT (91)..(91): The amino acid at position 91 is any amino acid other than His. In some cases, it is Ala.
APLKIQAYFNETADLPCQFANSQNQSLSELVVFWQDQENLVLNEVYLGKEKFDSVHSKYMXRTSFDSDSWTLRLHNLQIKDKGLYQCIIHXKKPTGMIRIHQMNSELSVLANFSQPEIVPISNITENVYINLTCSSIHGYPEPKKMSVLLRTKNSTIEYDGIMQKSQDNVTELYDVSISLSVSFPDVTSNMTIFCILETDKTRLLSSPFSIELEDPQPPPDHIP

SEQ ID NO: 151 - protein, 110 aa, Artificial sequence
  synthetic sequence
  VARIANT (61)..(61): The amino acid at position 61 is any amino acid other than Asn. In some cases, it is Ala.
  VARIANT (91)..(91): The amino acid at position 91 is any amino acid other than His. In some cases, it is Ala.
APLKIQAYFNETADLPCQFANSQNQSLSELVVFWQDQENLVLNEVYLGKEKFDSVHSKYMXRTSFDSDSWTLRLHNLQIKDKGLYQCIIHXKKPTGMIRIHQMNSELSVL

SEQ ID NO: 152 - protein, 224 aa, Artificial sequence
  synthetic sequence
  VARIANT (66)..(66): The amino acid at position 66 is any amino acid other than Asp. In some cases, it is Ala.
  VARIANT (91)..(91): The amino acid at position 91 is any amino acid other than His. In some cases, it is Ala.
APLKIQAYFNETADLPCQFANSQNQSLSELVVFWQDQENLVLNEVYLGKEKFDSVHSKYMNRTSFXSDSWTLRLHNLQIKDKGLYQCIIHXKKPTGMIRIHQMNSELSVLANFSQPEIVPISNITENVYINLTCSSIHGYPEPKKMSVLLRTKNSTIEYDGIMQKSQDNVTELYDVSISLSVSFPDVTSNMTIFCILETDKTRLLSSPFSIELEDPQPPPDHIP

SEQ ID NO: 153 - protein, 110 aa, Artificial sequence
  synthetic sequence
  VARIANT (66)..(66): The amino acid at position 66 is any amino acid other than Asn. In some cases, it is Ala.
  VARIANT (91)..(91): The amino acid at position 66 is any amino acid other than His. In some cases, it is Ala.
APLKIQAYFNETADLPCQFANSQNQSLSELVVFWQDQENLVLNEVYLGKEKFDSVHSKYMNRTSFXSDSWTLRLHNLQIKDKGLYQCIIHXKKPTGMIRIHQMNSELSVL

SEQ ID NO: 154 - protein, 224 aa, Artificial sequence
  synthetic sequence
  VARIANT (61)..(61): The amino acid at position 61 is any amino acid other than Asn. In some cases, it is Ala.
  VARIANT (66)..(66): The amino acid at position 61 is any amino acid other than Asp. In some cases, it is Ala.
  VARIANT (91)..(91): The amino acid at position 61 is any amino acid other than His. In some cases, it is Ala.
APLKIQAYFNETADLPCQFANSQNQSLSELVVFWQDQENLVLNEVYLGKEKFDSVHSKYMXRTSFXSDSWTLRLHNLQIKDKGLYQCIIHXKKPTGMIRIHQMNSELSVLANFSQPEIVPISNITENVYINLTCSSIHGYPEPKKMSVLLRTKNSTIEYDGIMQKSQDNVTELYDVSISLSVSFPDVTSNMTIFCILETDKTRLLSSPFSIELEDPQPPPDHIP

SEQ ID NO: 155 - protein, 110 aa, Artificial sequence
  synthetic sequence
  VARIANT (61)..(61): The amino acid at position 61 is any amino acid other than Asn. In some cases, it is Ala.
  VARIANT (66)..(66): The amino acid at position 66 is any amino acid other than Asp. In some cases, it is Ala.
  VARIANT (91)..(91): The amino acid at position 66 is any amino acid other than His. In some cases, it is Ala.
APLKIQAYFNETADLPCQFANSQNQSLSELVVFWQDQENLVLNEVYLGKEKFDSVHSKYMXRTSFXSDSWTLRLHNLQIKDKGLYQCIIHXKKPTGMIRIHQMNSELSVL

SEQ ID NO: 156 - protein, 254 aa, Homo sapiens
MEYASDASLDPEAPWPPAPRARACRVLPWALVAGLLLLLLLAAACAVFLACPWAVSGARASPGSAASPRLREGPELSPDDPAGLLDLRQGMFAQLVAQNVLLIDGPLSWYSDPGLAGVSLTGGLSYKEDTKELVVAKAGVYYVFFQLELRRVVAGEGSGSVSLALHLQPLRSAAGAAALALTVDLPPASSEARNSAFGFQGRLLHLSAGQRLGVHLHTEARARHAWQLTQGATVLGLFRVTPEIPAGLPSPRSE

SEQ ID NO: 157 - protein, 174 aa, Homo sapiens
PAGLLDLRQGMFAQLVAQNVLLIDGPLSWYSDPGLAGVSLTGGLSYKEDTKELVVAKAGVYYVFFQLELRRVVAGEGSGSVSLALHLQPLRSAAGAAALALTVDLPPASSEARNSAFGFQGRLLHLSAGQRLGVHLHTEARARHAWQLTQGATVLGLFRVTPEIPAGLPSPRSE

SEQ ID NO: 158 - protein, 175 aa, Homo sapiens
DPAGLLDLRQGMFAQLVAQNVLLIDGPLSWYSDPGLAGVSLTGGLSYKEDTKELVVAKAGVYYVFFQLELRRVVAGEGSGSVSLALHLQPLRSAAGAAALALTVDLPPASSEARNSAFGFQGRLLHLSAGQRLGVHLHTEARARHAWQLTQGATVLGLFRVTPEIPAGLPSPRSE

SEQ ID NO: 159 - protein, 167 aa, Homo sapiens
DPAGLLDLRQGMFAQLVAQNVLLIDGPLSWYSDPGLAGVSLTGGLSYKEDTKELVVAKAGVYYVFFQLELRRVVAGEGSGSVSLALHLQPLRSAAGAAALALTVDLPPASSEARNSAFGFQGRLLHLSAGQRLGVHLHTEARARHAWQLTQGATVLGLFRVTPEIPA

SEQ ID NO: 160 - protein, 255 aa, Homo sapiens
MGNSCYNIVATLLLVLNFERTRSLQDPCSNCPAGTFCDNNRNQICSPCPPNSFSSAGGQRTCDICRQCKGVFRTRKECSSTSNAECDCTPGFHCLGAGCSMCEQDCKQGQELTKKGCKDCCFGTFNDQKRGICRPWTNCSLDGKSVLVNGTKERDVVCGPSPADLSPGASSVTPPAPAREPGHSPQIISFFLALTSTALLFLLFFLTLRFSVVKRGRKKLLYIFKQPFMRPVQTTQEEDGCSCRFPEEEEGGCEL

SEQ ID NO: 161 - protein, 174 aa, Artificial sequence
  synthetic sequence
  VARIANT (47)..(47): The amino acid at position 47 is is any amino acid other than Lys. In some cases, it is Ala.
PAGLLDLRQGMFAQLVAQNVLLIDGPLSWYSDPGLAGVSLTGGLSYXEDTKELVVAKAGVYYVFFQLELRRVVAGEGSGSVSLALHLQPLRSAAGAAALALTVDLPPASSEARNSAFGFQGRLLHLSAGQRLGVHLHTEARARHAWQLTQGATVLGLFRVTPEIPAGLPSPRSE

SEQ ID NO: 162 - protein, 174 aa, Artificial sequence
  synthetic sequence
  VARIANT (147)..(147): The amino acid at position 147 is any amino acid other than Gln. In some cases, it is Ala.
PAGLLDLRQGMFAQLVAQNVLLIDGPLSWYSDPGLAGVSLTGGLSYKEDTKELVVAKAGVYYVFFQLELRRVVAGEGSGSVSLALHLQPLRSAAGAAALALTVDLPPASSEARNSAFGFQGRLLHLSAGQRLGVHLHTEARARHAWXLTQGATVLGLFRVTPEIPAGLPSPRSE

SEQ ID NO: 163 - protein, 174 aa, Artificial sequence
  synthetic sequence
  VARIANT (11)..(11): The amino acid at position 11 is any amino acid other than Met. In some cases, it is Ala.
PAGLLDLRQGXFAQLVAQNVLLIDGPLSWYSDPGLAGVSLTGGLSYKEDTKELVVAKAGVYYVFFQLELRRVVAGEGSGSVSLALHLQPLRSAAGAAALALTVDLPPASSEARNSAFGFQGRLLHLSAGQRLGVHLHTEARARHAWQLTQGATVLGLFRVTPEIPAGLPSPRSE

SEQ ID NO: 164 - protein, 174 aa, Artificial sequence
  synthetic sequence
  VARIANT (12)..(12): The amino acid at position 12 is is any amino acid other than Phe. In some cases, it is Ala.
PAGLLDLRQGMXAQLVAQNVLLIDGPLSWYSDPGLAGVSLTGGLSYKEDTKELVVAKAGVYYVFFQLELRRVVAGEGSGSVSLALHLQPLRSAAGAAALALTVDLPPASSEARNSAFGFQGRLLHLSAGQRLGVHLHTEARARHAWQLTQGATVLGLFRVTPEIPAGLPSPRSE

SEQ ID NO: 165 - protein, 174 aa, Artificial sequence
  synthetic sequence
  VARIANT (14)..(14): The amino acid at position 14 is any amino acid other than Gln. In some cases, it is Ala.
PAGLLDLRQGMFAXLVAQNVLLIDGPLSWYSDPGLAGVSLTGGLSYKEDTKELVVAKAGVYYVFFQLELRRVVAGEGSGSVSLALHLQPLRSAAGAAALALTVDLPPASSEARNSAFGFQGRLLHLSAGQRLGVHLHTEARARHAWQLTQGATVLGLFRVTPEIPAGLPSPRSE

SEQ ID NO: 166 - protein, 174 aa, Artificial sequence
  synthetic sequence
  VARIANT (15)..(15): The amino acid at position 15 is any amino acid other than Leu. In some cases, it is Ala.
PAGLLDLRQGMFAQXVAQNVLLIDGPLSWYSDPGLAGVSLTGGLSYKEDTKELVVAKAGVYYVFFQLELRRVVAGEGSGSVSLALHLQPLRSAAGAAALALTVDLPPASSEARNSAFGFQGRLLHLSAGQRLGVHLHTEARARHAWQLTQGATVLGLFRVTPEIPAGLPSPRSE

SEQ ID NO: 167 - protein, 174 aa, Artificial sequence
  synthetic sequence
  VARIANT (16)..(16): The amino acid at position 16 is any amino acid other than Val. In some cases, it is Ala.
PAGLLDLRQGMFAQLXAQNVLLIDGPLSWYSDPGLAGVSLTGGLSYKEDTKELVVAKAGVYYVFFQLELRRVVAGEGSGSVSLALHLQPLRSAAGAAALALTVDLPPASSEARNSAFGFQGRLLHLSAGQRLGVHLHTEARARHAWQLTQGATVLGLFRVTPEIPAGLPSPRSE

SEQ ID NO: 168 - protein, 174 aa, Artificial sequence
  synthetic sequence
  VARIANT (18)..(18): The amino acid at position 18 is any amino acid other than Gln. In some cases, it is Ala.
PAGLLDLRQGMFAQLVAXNVLLIDGPLSWYSDPGLAGVSLTGGLSYKEDTKELVVAKAGVYYVFFQLELRRVVAGEGSGSVSLALHLQPLRSAAGAAALALTVDLPPASSEARNSAFGFQGRLLHLSAGQRLGVHLHTEARARHAWQLTQGATVLGLFRVTPEIPAGLPSPRSE

SEQ ID NO: 169 - protein, 174 aa, Artificial sequence
  synthetic sequence
  VARIANT (19)..(19): The amino acid at position 19 is any amino acid other than Asn. In some cases, it is Ala.
PAGLLDLRQGMFAQLVAQXVLLIDGPLSWYSDPGLAGVSLTGGLSYKEDTKELVVAKAGVYYVFFQLELRRVVAGEGSGSVSLALHLQPLRSAAGAAALALTVDLPPASSEARNSAFGFQGRLLHLSAGQRLGVHLHTEARARHAWQLTQGATVLGLFRVTPEIPAGLPSPRSE

SEQ ID NO: 170 - protein, 174 aa, Artificial sequence
  synthetic sequence
  VARIANT (20)..(20): The amino acid at position 20 is any amino acid other than Val. In some cases, it is Ala.
PAGLLDLRQGMFAQLVAQNXLLIDGPLSWYSDPGLAGVSLTGGLSYKEDTKELVVAKAGVYYVFFQLELRRVVAGEGSGSVSLALHLQPLRSAAGAAALALTVDLPPASSEARNSAFGFQGRLLHLSAGQRLGVHLHTEARARHAWQLTQGATVLGLFRVTPEIPAGLPSPRSE

SEQ ID NO: 171 - protein, 174 aa, Artificial sequence
  synthetic sequence
  VARIANT (21)..(21): The amino acid at position 21 is any amino acid other than Leu. In some cases, it is Ala.
PAGLLDLRQGMFAQLVAQNVXLIDGPLSWYSDPGLAGVSLTGGLSYKEDTKELVVAKAGVYYVFFQLELRRVVAGEGSGSVSLALHLQPLRSAAGAAALALTVDLPPASSEARNSAFGFQGRLLHLSAGQRLGVHLHTEARARHAWQLTQGATVLGLFRVTPEIPAGLPSPRSE

SEQ ID NO: 172 - protein, 174 aa, Artificial sequence
  synthetic sequence
  VARIANT (22)..(22): The amino acid at position 22 is any amino acid other than Leu. In some cases, it is Ala.
PAGLLDLRQGMFAQLVAQNVLXIDGPLSWYSDPGLAGVSLTGGLSYKEDTKELVVAKAGVYYVFFQLELRRVVAGEGSGSVSLALHLQPLRSAAGAAALALTVDLPPASSEARNSAFGFQGRLLHLSAGQRLGVHLHTEARARHAWQLTQGATVLGLFRVTPEIPAGLPSPRSE

SEQ ID NO: 173 - protein, 174 aa, Artificial sequence
  synthetic sequence
  VARIANT (23)..(23): The amino acid at position 23 is any amino acid other than Ile. In some cases, it is Ala.
PAGLLDLRQGMFAQLVAQNVLLXDGPLSWYSDPGLAGVSLTGGLSYKEDTKELVVAKAGVYYVFFQLELRRVVAGEGSGSVSLALHLQPLRSAAGAAALALTVDLPPASSEARNSAFGFQGRLLHLSAGQRLGVHLHTEARARHAWQLTQGATVLGLFRVTPEIPAGLPSPRSE

SEQ ID NO: 174 - protein, 174 aa, Artificial sequence
  synthetic sequence
  VARIANT (24)..(24): The amino acid at position 24 is any amino acid other than Asp. In some cases, it is Ala.
PAGLLDLRQGMFAQLVAQNVLLIXGPLSWYSDPGLAGVSLTGGLSYKEDTKELVVAKAGVYYVFFQLELRRVVAGEGSGSVSLALHLQPLRSAAGAAALALTVDLPPASSEARNSAFGFQGRLLHLSAGQRLGVHLHTEARARHAWQLTQGATVLGLFRVTPEIPAGLPSPRSE

SEQ ID NO: 175 - protein, 174 aa, Artificial sequence
  synthetic sequence
  VARIANT (25)..(25): The amino acid at position 25 is any amino acid other than Gly. In some cases, it is Ala.
PAGLLDLRQGMFAQLVAQNVLLIDXPLSWYSDPGLAGVSLTGGLSYKEDTKELVVAKAGVYYVFFQLELRRVVAGEGSGSVSLALHLQPLRSAAGAAALALTVDLPPASSEARNSAFGFQGRLLHLSAGQRLGVHLHTEARARHAWQLTQGATVLGLFRVTPEIPAGLPSPRSE

SEQ ID NO: 176 - protein, 174 aa, Artificial sequence
  synthetic sequence
  VARIANT (26)..(26): The amino acid at position 26 is any amino acid other than Pro. In some cases, it is Ala.
PAGLLDLRQGMFAQLVAQNVLLIGGXLSWYSDPGLAGVSLTGGLSYKEDTKELVVAKAGVYYVFFQLELRRVVAGEGSGSVSLALHLQPLRSAAGAAALALTVDLPPASSEARNSAFGFQGRLLHLSAGQRLGVHLHTEARARHAWQLTQGATVLGLFRVTPEIPAGLPSPRSE

SEQ ID NO: 177 - protein, 174 aa, Artificial sequence
  synthetic sequence
  VARIANT (27)..(27): The amino acid at position 27 is any amino acid other than Leu. In some cases, it is Ala.
PAGLLDLRQGMFAQLVAQNVLLIGGPXSWYSDPGLAGVSLTGGLSYKEDTKELVVAKAGVYYVFFQLELRRVVAGEGSGSVSLALHLQPLRSAAGAAALALTVDLPPASSEARNSAFGFQGRLLHLSAGQRLGVHLHTEARARHAWQLTQGATVLGLFRVTPEIPAGLPSPRSE

SEQ ID NO: 178 - protein, 174 aa, Artificial sequence
  synthetic sequence
  VARIANT (28)..(28): The amino acid at position 28 is any amino acid other than Ser. In some cases, it is Ala.
PAGLLDLRQGMFAQLVAQNVLLIGGPLXWYSDPGLAGVSLTGGLSYKEDTKELVVAKAGVYYVFFQLELRRVVAGEGSGSVSLALHLQPLRSAAGAAALALTVDLPPASSEARNSAFGFQGRLLHLSAGQRLGVHLHTEARARHAWQLTQGATVLGLFRVTPEIPAGLPSPRSE

SEQ ID NO: 179 - protein, 174 aa, Artificial sequence
  synthetic sequence
  VARIANT (29)..(29): The amino acid at position 29 is any amino acid other than Trp. In some cases, it is Ala.
PAGLLDLRQGMFAQLVAQNVLLIGGPLSXYSDPGLAGVSLTGGLSYKEDTKELVVAKAGVYYVFFQLELRRVVAGEGSGSVSLALHLQPLRSAAGAAALALTVDLPPASSEARNSAFGFQGRLLHLSAGQRLGVHLHTEARARHAWQLTQGATVLGLFRVTPEIPAGLPSPRSE

SEQ ID NO: 180 - protein, 174 aa, Artificial sequence
  synthetic sequence
  VARIANT (30)..(30): The amino acid at position 30 is any amino acid other than Tyr. In some cases, it is Ala.
PAGLLDLRQGMFAQLVAQNVLLIGGPLSWXSDPGLAGVSLTGGLSYKEDTKELVVAKAGVYYVFFQLELRRVVAGEGSGSVSLALHLQPLRSAAGAAALALTVDLPPASSEARNSAFGFQGRLLHLSAGQRLGVHLHTEARARHAWQLTQGATVLGLFRVTPEIPAGLPSPRSE

SEQ ID NO: 181 - protein, 174 aa, Artificial sequence
  synthetic sequence
  VARIANT (31)..(31): The amino acid at position 31 is any amino acid other than Ser. In some cases, it is Ala.
PAGLLDLRQGMFAQLVAQNVLLIGGPLSWYXDPGLAGVSLTGGLSYKEDTKELVVAKAGVYYVFFQLELRRVVAGEGSGSVSLALHLQPLRSAAGAAALALTVDLPPASSEARNSAFGFQGRLLHLSAGQRLGVHLHTEARARHAWQLTQGATVLGLFRVTPEIPAGLPSPRSE

SEQ ID NO: 182 - protein, 174 aa, Artificial sequence
  synthetic sequence
  VARIANT (32)..(32): The amino acid at position 32 is any amino acid other than Asp. In some cases, it is Ala.
PAGLLDLRQGMFAQLVAQNVLLIGGPLSWYSXPGLAGVSLTGGLSYKEDTKELVVAKAGVYYVFFQLELRRVVAGEGSGSVSLALHLQPLRSAAGAAALALTVDLPPASSEARNSAFGFQGRLLHLSAGQRLGVHLHTEARARHAWQLTQGATVLGLFRVTPEIPAGLPSPRSE

SEQ ID NO: 183 - protein, 174 aa, Artificial sequence
  synthetic sequence
  VARIANT (33)..(33): The amino acid at position 33 is any amino acid other than Pro. In some cases, it is Ala.
PAGLLDLRQGMFAQLVAQNVLLIGGPLSWYSDXGLAGVSLTGGLSYKEDTKELVVAKAGVYYVFFQLELRRVVAGEGSGSVSLALHLQPLRSAAGAAALALTVDLPPASSEARNSAFGFQGRLLHLSAGQRLGVHLHTEARARHAWQLTQGATVLGLFRVTPEIPAGLPSPRSE

SEQ ID NO: 184 - protein, 174 aa, Artificial sequence
  synthetic sequence
  VARIANT (34)..(34): The amino acid at position 34 is any amino acid other than Gly. In some cases, it is Ala.
PAGLLDLRQGMFAQLVAQNVLLIGGPLSWYSDPXLAGVSLTGGLSYKEDTKELVVAKAGVYYVFFQLELRRVVAGEGSGSVSLALHLQPLRSAAGAAALALTVDLPPASSEARNSAFGFQGRLLHLSAGQRLGVHLHTEARARHAWQLTQGATVLGLFRVTPEIPAGLPSPRSE

SEQ ID NO: 185 - protein, 174 aa, Artificial sequence
  synthetic sequence
  VARIANT (35)..(35): The amino acid at position 35 is any amino acid other than Leu. In some cases, it is Ala.
PAGLLDLRQGMFAQLVAQNVLLIGGPLSWYSDPGXAGVSLTGGLSYKEDTKELVVAKAGVYYVFFQLELRRVVAGEGSGSVSLALHLQPLRSAAGAAALALTVDLPPASSEARNSAFGFQGRLLHLSAGQRLGVHLHTEARARHAWQLTQGATVLGLFRVTPEIPAGLPSPRSE

SEQ ID NO: 186 - protein, 174 aa, Artificial sequence
  synthetic sequence
  VARIANT (37)..(37): The amino acid at position 37 is any amino acid other than Gly. In some cases, it is Ala.
PAGLLDLRQGMFAQLVAQNVLLIGGPLSWYSDPGLAXVSLTGGLSYKEDTKELVVAKAGVYYVFFQLELRRVVAGEGSGSVSLALHLQPLRSAAGAAALALTVDLPPASSEARNSAFGFQGRLLHLSAGQRLGVHLHTEARARHAWQLTQGATVLGLFRVTPEIPAGLPSPRSE

SEQ ID NO: 187 - protein, 174 aa, Artificial sequence
  synthetic sequence
  VARIANT (38)..(38): The amino acid at position 38 is any amino acid other than Val. In some cases, it is Ala.
PAGLLDLRQGMFAQLVAQNVLLIGGPLSWYSDPGLAGXSLTGGLSYKEDTKELVVAKAGVYYVFFQLELRRVVAGEGSGSVSLALHLQPLRSAAGAAALALTVDLPPASSEARNSAFGFQGRLLHLSAGQRLGVHLHTEARARHAWQLTQGATVLGLFRVTPEIPAGLPSPRSE

SEQ ID NO: 188 - protein, 174 aa, Artificial sequence
  synthetic sequence
  VARIANT (39)..(39): The amino acid at position 39 is any amino acid other than Val. In some cases, it is Ala.
PAGLLDLRQGMFAQLVAQNVLLIGGPLSWYSDPGLAGVXLTGGLSYKEDTKELVVAKAGVYYVFFQLELRRVVAGEGSGSVSLALHLQPLRSAAGAAALALTVDLPPASSEARNSAFGFQGRLLHLSAGQRLGVHLHTEARARHAWQLTQGATVLGLFRVTPEIPAGLPSPRSE

SEQ ID NO: 189 - protein, 174 aa, Artificial sequence
  synthetic sequence
  VARIANT (40)..(40): The amino acid at position 40 is any amino acid other than Leu. In some cases, it is Ala.
PAGLLDLRQGMFAQLVAQNVLLIGGPLSWYSDPGLAGVSXTGGLSYKEDTKELVVAKAGVYYVFFQLELRRVVAGEGSGSVSLALHLQPLRSAAGAAALALTVDLPPASSEARNSAFGFQGRLLHLSAGQRLGVHLHTEARARHAWQLTQGATVLGLFRVTPEIPAGLPSPRSE

SEQ ID NO: 190 - protein, 174 aa, Artificial sequence
  synthetic sequence
  VARIANT (41)..(41): The amino acid at position 41 is any amino acid other than Thr. In some cases, it is Ala.
PAGLLDLRQGMFAQLVAQNVLLIGGPLSWYSDPGLAGVSLXGGLSYKEDTKELVVAKAGVYYVFFQLELRRVVAGEGSGSVSLALHLQPLRSAAGAAALALTVDLPPASSEARNSAFGFQGRLLHLSAGQRLGVHLHTEARARHAWQLTQGATVLGLFRVTPEIPAGLPSPRSE

SEQ ID NO: 191 - protein, 174 aa, Artificial sequence
  synthetic sequence
  VARIANT (42)..(42): The amino acid at position 42 is any amino acid other than Gly. In some cases, it is Ala.
PAGLLDLRQGMFAQLVAQNVLLIGGPLSWYSDPGLAGVSLTXGLSYKEDTKELVVAKAGVYYVFFQLELRRVVAGEGSGSVSLALHLQPLRSAAGAAALALTVDLPPASSEARNSAFGFQGRLLHLSAGQRLGVHLHTEARARHAWQLTQGATVLGLFRVTPEIPAGLPSPRSE

SEQ ID NO: 192 - protein, 174 aa, Artificial sequence
  synthetic sequence
  VARIANT (43)..(43): The amino acid at position 43 is any amino acid other than Gly. In some cases, it is Ala.
PAGLLDLRQGMFAQLVAQNVLLIGGPLSWYSDPGLAGVSLTGXLSYKEDTKELVVAKAGVYYVFFQLELRRVVAGEGSGSVSLALHLQPLRSAAGAAALALTVDLPPASSEARNSAFGFQGRLLHLSAGQRLGVHLHTEARARHAWQLTQGATVLGLFRVTPEIPAGLPSPRSE

SEQ ID NO: 193 - protein, 174 aa, Artificial sequence
  synthetic sequence
  VARIANT (44)..(44): The amino acid at position 44 is any amino acid other than Leu. In some cases, it is Ala.
PAGLLDLRQGMFAQLVAQNVLLIGGPLSWYSDPGLAGVSLTGGXSYKEDTKELVVAKAGVYYVFFQLELRRVVAGEGSGSVSLALHLQPLRSAAGAAALALTVDLPPASSEARNSAFGFQGRLLHLSAGQRLGVHLHTEARARHAWQLTQGATVLGLFRVTPEIPAGLPSPRSE

SEQ ID NO: 194 - protein, 174 aa, Artificial sequence
  synthetic sequence
  VARIANT (45)..(45): The amino acid at position 45is any amino acid other than Ser. In some cases, it is Ala.
PAGLLDLRQGMFAQLVAQNVLLIGGPLSWYSDPGLAGVSLTGGLXYKEDTKELVVAKAGVYYVFFQLELRRVVAGEGSGSVSLALHLQPLRSAAGAAALALTVDLPPASSEARNSAFGFQGRLLHLSAGQRLGVHLHTEARARHAWQLTQGATVLGLFRVTPEIPAGLPSPRSE

SEQ ID NO: 195 - protein, 174 aa, Artificial sequence
  synthetic sequence
  VARIANT (46)..(46): The amino acid at position 46 is any amino acid other than Tyr. In some cases, it is Ala.
PAGLLDLRQGMFAQLVAQNVLLIGGPLSWYSDPGLAGVSLTGGLSXKEDTKELVVAKAGVYYVFFQLELRRVVAGEGSGSVSLALHLQPLRSAAGAAALALTVDLPPASSEARNSAFGFQGRLLHLSAGQRLGVHLHTEARARHAWQLTQGATVLGLFRVTPEIPAGLPSPRSE

SEQ ID NO: 196 - protein, 174 aa, Artificial sequence
  synthetic sequence
  VARIANT (48)..(48): The amino acid at position 48 is any amino acid other than Glu. In some cases, it is Ala.
PAGLLDLRQGMFAQLVAQNVLLIGGPLSWYSDPGLAGVSLTGGLSYKXDTKELVVAKAGVYYVFFQLELRRVVAGEGSGSVSLALHLQPLRSAAGAAALALTVDLPPASSEARNSAFGFQGRLLHLSAGQRLGVHLHTEARARHAWQLTQGATVLGLFRVTPEIPAGLPSPRSE

SEQ ID NO: 197 - protein, 174 aa, Artificial sequence
  synthetic sequence
  VARIANT (49)..(49): The amino acid at position 49 is any amino acid other than Asp. In some cases, it is Ala.
PAGLLDLRQGMFAQLVAQNVLLIGGPLSWYSDPGLAGVSLTGGLSYKEXTKELVVAKAGVYYVFFQLELRRVVAGEGSGSVSLALHLQPLRSAAGAAALALTVDLPPASSEARNSAFGFQGRLLHLSAGQRLGVHLHTEARARHAWQLTQGATVLGLFRVTPEIPAGLPSPRSE

SEQ ID NO: 198 - protein, 174 aa, Artificial sequence
  synthetic sequence
  VARIANT (50)..(50): The amino acid at position 50 is any amino acid other than Thr. In some cases, it is Ala.
PAGLLDLRQGMFAQLVAQNVLLIGGPLSWYSDPGLAGVSLTGGLSYKEDXKELVVAKAGVYYVFFQLELRRVVAGEGSGSVSLALHLQPLRSAAGAAALALTVDLPPASSEARNSAFGFQGRLLHLSAGQRLGVHLHTEARARHAWQLTQGATVLGLFRVTPEIPAGLPSPRSE

SEQ ID NO: 199 - protein, 174 aa, Artificial sequence
  synthetic sequence
  VARIANT (51)..(51): The amino acid at position 51 is any amino acid other than Lys. In some cases, it is Ala.
PAGLLDLRQGMFAQLVAQNVLLIGGPLSWYSDPGLAGVSLTGGLSYKEDTXELVVAKAGVYYVFFQLELRRVVAGEGSGSVSLALHLQPLRSAAGAAALALTVDLPPASSEARNSAFGFQGRLLHLSAGQRLGVHLHTEARARHAWQLTQGATVLGLFRVTPEIPAGLPSPRSE

SEQ ID NO: 200 - protein, 174 aa, Artificial sequence
  synthetic sequence
  VARIANT (52)..(52): The amino acid at position 52 is any amino acid other than Glu. In some cases, it is Ala.
PAGLLDLRQGMFAQLVAQNVLLIGGPLSWYSDPGLAGVSLTGGLSYKEDTKXLVVAKAGVYYVFFQLELRRVVAGEGSGSVSLALHLQPLRSAAGAAALALTVDLPPASSEARNSAFGFQGRLLHLSAGQRLGVHLHTEARARHAWQLTQGATVLGLFRVTPEIPAGLPSPRSE

SEQ ID NO: 201 - protein, 174 aa, Artificial sequence
  synthetic sequence
  VARIANT (64)..(64): The amino acid at position 64 is any amino acid other than Phe. In some cases, it is Ala.
PAGLLDLRQGMFAQLVAQNVLLIGGPLSWYSDPGLAGVSLTGGLSYKEDTKELVVAKAGVYYVXFQLELRRVVAGEGSGSVSLALHLQPLRSAAGAAALALTVDLPPASSEARNSAFGFQGRLLHLSAGQRLGVHLHTEARARHAWQLTQGATVLGLFRVTPEIPAGLPSPRSE

SEQ ID NO: 202 - protein, 174 aa, Artificial sequence
  synthetic sequence
  VARIANT (65)..(65): The amino acid at position 65 is any amino acid other than Phe. In some cases, it is Ala.
PAGLLDLRQGMFAQLVAQNVLLIGGPLSWYSDPGLAGVSLTGGLSYKEDTKELVVAKAGVYYVFXQLELRRVVAGEGSGSVSLALHLQPLRSAAGAAALALTVDLPPASSEARNSAFGFQGRLLHLSAGQRLGVHLHTEARARHAWQLTQGATVLGLFRVTPEIPAGLPSPRSE

SEQ ID NO: 203 - protein, 174 aa, Artificial sequence
  synthetic sequence
  VARIANT (66)..(66): The amino acid at position 66 is any amino acid other than Gln. In some cases, it is Ala.
PAGLLDLRQGMFAQLVAQNVLLIGGPLSWYSDPGLAGVSLTGGLSYKEDTKELVVAKAGVYYVFFXLELRRVVAGEGSGSVSLALHLQPLRSAAGAAALALTVDLPPASSEARNSAFGFQGRLLHLSAGQRLGVHLHTEARARHAWQLTQGATVLGLFRVTPEIPAGLPSPRSE

SEQ ID NO: 204 - protein, 174 aa, Artificial sequence
  synthetic sequence
  VARIANT (67)..(67): The amino acid at position 67 is any amino acid other than Leu. In some cases, it is Ala.
PAGLLDLRQGMFAQLVAQNVLLIGGPLSWYSDPGLAGVSLTGGLSYKEDTKELVVAKAGVYYVFFQXELRRVVAGEGSGSVSLALHLQPLRSAAGAAALALTVDLPPASSEARNSAFGFQGRLLHLSAGQRLGVHLHTEARARHAWQLTQGATVLGLFRVTPEIPAGLPSPRSE

SEQ ID NO: 205 - protein, 174 aa, Artificial sequence
  synthetic sequence
  VARIANT (68)..(68): The amino acid at position 68 is any amino acid other than Glu. In some cases, it is Ala.
PAGLLDLRQGMFAQLVAQNVLLIGGPLSWYSDPGLAGVSLTGGLSYKEDTKELVVAKAGVYYVFFQLXLRRVVAGEGSGSVSLALHLQPLRSAAGAAALALTVDLPPASSEARNSAFGFQGRLLHLSAGQRLGVHLHTEARARHAWQLTQGATVLGLFRVTPEIPAGLPSPRSE

SEQ ID NO: 206 - protein, 174 aa, Artificial sequence
  synthetic sequence
  VARIANT (69)..(69): The amino acid at position 69 is any amino acid other than Leu. In some cases, it is Ala.
PAGLLDLRQGMFAQLVAQNVLLIGGPLSWYSDPGLAGVSLTGGLSYKEDTKELVVAKAGVYYVFFQLEXRRVVAGEGSGSVSLALHLQPLRSAAGAAALALTVDLPPASSEARNSAFGFQGRLLHLSAGQRLGVHLHTEARARHAWQLTQGATVLGLFRVTPEIPAGLPSPRSE

SEQ ID NO: 207 - protein, 174 aa, Artificial sequence
  synthetic sequence
  VARIANT (70)..(70): The amino acid at position 70 is any amino acid other than Arg. In some cases, it is Ala.
PAGLLDLRQGMFAQLVAQNVLLIGGPLSWYSDPGLAGVSLTGGLSYKEDTKELVVAKAGVYYVFFQLELXRVVAGEGSGSVSLALHLQPLRSAAGAAALALTVDLPPASSEARNSAFGFQGRLLHLSAGQRLGVHLHTEARARHAWQLTQGATVLGLFRVTPEIPAGLPSPRSE

SEQ ID NO: 208 - protein, 174 aa, Artificial sequence
  synthetic sequence
  VARIANT (71)..(71): The amino acid at position 71 is any amino acid other than Arg. In some cases, it is Ala.
PAGLLDLRQGMFAQLVAQNVLLIGGPLSWYSDPGLAGVSLTGGLSYKEDTKELVVAKAGVYYVFFQLELRXVVAGEGSGSVSLALHLQPLRSAAGAAALALTVDLPPASSEARNSAFGFQGRLLHLSAGQRLGVHLHTEARARHAWQLTQGATVLGLFRVTPEIPAGLPSPRSE

SEQ ID NO: 209 - protein, 174 aa, Artificial sequence
  synthetic sequence
  VARIANT (72)..(72): The amino acid at position 72 is any amino acid other than Val. In some cases, it is Ala.
PAGLLDLRQGMFAQLVAQNVLLIGGPLSWYSDPGLAGVSLTGGLSYKEDTKELVVAKAGVYYVFFQLELRRXVAGEGSGSVSLALHLQPLRSAAGAAALALTVDLPPASSEARNSAFGFQGRLLHLSAGQRLGVHLHTEARARHAWQLTQGATVLGLFRVTPEIPAGLPSPRSE

SEQ ID NO: 210 - protein, 174 aa, Artificial sequence
  synthetic sequence
  VARIANt (73)..(73): The amino acid at position 73 is any amino acid other than Val. In some cases, it is Ala.
PAGLLDLRQGMFAQLVAQNVLLIGGPLSWYSDPGLAGVSLTGGLSYKEDTKELVVAKAGVYYVFFQLELRRVXAGEGSGSVSLALHLQPLRSAAGAAALALTVDLPPASSEARNSAFGFQGRLLHLSAGQRLGVHLHTEARARHAWQLTQGATVLGLFRVTPEIPAGLPSPRSE

SEQ ID NO: 211 - protein, 174 aa, Artificial sequence
  synthetic sequence
  VARIANT (75)..(75): The amino acid at position 75 is any amino acid other than Gly. In some cases, it is Ala.
PAGLLDLRQGMFAQLVAQNVLLIGGPLSWYSDPGLAGVSLTGGLSYKEDTKELVVAKAGVYYVFFQLELRRVVAXEGSGSVSLALHLQPLRSAAGAAALALTVDLPPASSEARNSAFGFQGRLLHLSAGQRLGVHLHTEARARHAWQLTQGATVLGLFRVTPEIPAGLPSPRSE

SEQ ID NO: 212 - protein, 174 aa, Artificial sequence
  synthetic sequence
  VARIANT (76)..(76): The amino acid at position 76 is any amino acid other than Glu. In some cases, it is Ala.
PAGLLDLRQGMFAQLVAQNVLLIGGPLSWYSDPGLAGVSLTGGLSYKEDTKELVVAKAGVYYVFFQLELRRVVAGXGSGSVSLALHLQPLRSAAGAAALALTVDLPPASSEARNSAFGFQGRLLHLSAGQRLGVHLHTEARARHAWQLTQGATVLGLFRVTPEIPAGLPSPRSE

SEQ ID NO: 213 - protein, 174 aa, Artificial sequence
  synthetic sequence
  VARIANT (77)..(77): The amino acid at position 77 is any amino acid other than Gly. In some cases, it is Ala.
PAGLLDLRQGMFAQLVAQNVLLIGGPLSWYSDPGLAGVSLTGGLSYKEDTKELVVAKAGVYYVFFQLELRRVVAGEXSGSVSLALHLQPLRSAAGAAALALTVDLPPASSEARNSAFGFQGRLLHLSAGQRLGVHLHTEARARHAWQLTQGATVLGLFRVTPEIPAGLPSPRSE

SEQ ID NO: 214 - protein, 174 aa, Artificial sequence
  synthetic sequence
  VARIANT (78)..(78): The amino acid at position 78 is any amino acid other than Ser. In some cases, it is Ala.
PAGLLDLRQGMFAQLVAQNVLLIGGPLSWYSDPGLAGVSLTGGLSYKEDTKELVVAKAGVYYVFFQLELRRVVAGEGXGSVSLALHLQPLRSAAGAAALALTVDLPPASSEARNSAFGFQGRLLHLSAGQRLGVHLHTEARARHAWQLTQGATVLGLFRVTPEIPAGLPSPRSE

SEQ ID NO: 215 - protein, 174 aa, Artificial sequence
  synthetic sequence
  VARIANT (104)..(104): The amino acid at position 104 is any amino acid other than Asp. In some cases, it is Ala.
PAGLLDLRQGMFAQLVAQNVLLIGGPLSWYSDPGLAGVSLTGGLSYKEDTKELVVAKAGVYYVFFQLELRRVVAGEGSGSVSLALHLQPLRSAAGAAALALTVXLPPASSEARNSAFGFQGRLLHLSAGQRLGVHLHTEARARHAWQLTQGATVLGLFRVTPEIPAGLPSPRSE

SEQ ID NO: 216 - protein, 174 aa, Artificial sequence
  synthetic sequence
  VARIANT (105)..(105): The amino acid at position 105 is any amino acid other than Leu. In some cases, it is Ala.
PAGLLDLRQGMFAQLVAQNVLLIGGPLSWYSDPGLAGVSLTGGLSYKEDTKELVVAKAGVYYVFFQLELRRVVAGEGSGSVSLALHLQPLRSAAGAAALALTVDXPPASSEARNSAFGFQGRLLHLSAGQRLGVHLHTEARARHAWQLTQGATVLGLFRVTPEIPAGLPSPRSE

SEQ ID NO: 217 - protein, 174 aa, Artificial sequence
  synthetic sequence
  VARIANT (106)..(106): The amino acid at position 106 is any amino acid other than Pro. In some cases, it is Ala.
PAGLLDLRQGMFAQLVAQNVLLIGGPLSWYSDPGLAGVSLTGGLSYKEDTKELVVAKAGVYYVFFQLELRRVVAGEGSGSVSLALHLQPLRSAAGAAALALTVDLXPASSEARNSAFGFQGRLLHLSAGQRLGVHLHTEARARHAWQLTQGATVLGLFRVTPEIPAGLPSPRSE

SEQ ID NO: 218 - protein, 174 aa, Artificial sequence
  synthetic sequence
  VARIANT (109)..(109): The amino acid at position 109 is any amino acid other than Ser. In some cases, it is Ala.
PAGLLDLRQGMFAQLVAQNVLLIGGPLSWYSDPGLAGVSLTGGLSYKEDTKELVVAKAGVYYVFFQLELRRVVAGEGSGSVSLALHLQPLRSAAGAAALALTVDLPPAXSEARNSAFGFQGRLLHLSAGQRLGVHLHTEARARHAWQLTQGATVLGLFRVTPEIPAGLPSPRSE

SEQ ID NO: 219 - protein, 174 aa, Artificial sequence
  synthetic sequence
  VARIANT (110)..(110): The amino acid at position 110 is any amino acid other than Ser. In some cases, it is Ala.
PAGLLDLRQGMFAQLVAQNVLLIGGPLSWYSDPGLAGVSLTGGLSYKEDTKELVVAKAGVYYVFFQLELRRVVAGEGSGSVSLALHLQPLRSAAGAAALALTVDLPPASXEARNSAFGFQGRLLHLSAGQRLGVHLHTEARARHAWQLTQGATVLGLFRVTPEIPAGLPSPRSE

SEQ ID NO: 220 - protein, 174 aa, Artificial sequence
  synthetic sequence
  VARIANT (111)..(111): The amino acid at position 111 is is any amino acid other than Glu. In some cases, it is Ala.
PAGLLDLRQGMFAQLVAQNVLLIGGPLSWYSDPGLAGVSLTGGLSYKEDTKELVVAKAGVYYVFFQLELRRVVAGEGSGSVSLALHLQPLRSAAGAAALALTVDLPPASSXARNSAFGFQGRLLHLSAGQRLGVHLHTEARARHAWQLTQGATVLGLFRVTPEIPAGLPSPRSE

SEQ ID NO: 221 - protein, 174 aa, Artificial sequence
  synthetic sequence
  VARIANT (113)..(113): The amino acid at position 113 is any amino acid other than Arg. In some cases, it is Ala.
PAGLLDLRQGMFAQLVAQNVLLIGGPLSWYSDPGLAGVSLTGGLSYKEDTKELVVAKAGVYYVFFQLELRRVVAGEGSGSVSLALHLQPLRSAAGAAALALTVDLPPASSEAXNSAFGFQGRLLHLSAGQRLGVHLHTEARARHAWQLTQGATVLGLFRVTPEIPAGLPSPRSE

SEQ ID NO: 222 - protein, 174 aa, Artificial sequence
  synthetic sequence
  VARIANT (114)..(114): The amino acid at position 114 is any amino acid other than Asn. In some cases, it is Ala.
PAGLLDLRQGMFAQLVAQNVLLIGGPLSWYSDPGLAGVSLTGGLSYKEDTKELVVAKAGVYYVFFQLELRRVVAGEGSGSVSLALHLQPLRSAAGAAALALTVDLPPASSEARXSAFGFQGRLLHLSAGQRLGVHLHTEARARHAWQLTQGATVLGLFRVTPEIPAGLPSPRSE

SEQ ID NO: 223 - protein, 174 aa, Artificial sequence
  synthetic sequence
  VARIANT (115)..(115): The amino acid at position 115 is any amino acid other than Ser. In some cases, it is Ala.
PAGLLDLRQGMFAQLVAQNVLLIGGPLSWYSDPGLAGVSLTGGLSYKEDTKELVVAKAGVYYVFFQLELRRVVAGEGSGSVSLALHLQPLRSAAGAAALALTVDLPPASSEARNXAFGFQGRLLHLSAGQRLGVHLHTEARARHAWQLTQGATVLGLFRVTPEIPAGLPSPRSE

SEQ ID NO: 224 - protein, 174 aa, Artificial sequence
  synthetic sequence
  VARIANT (117)..(117): The amino acid at position 117 is any amino acid other than Phe. In some cases, it is Ala.
PAGLLDLRQGMFAQLVAQNVLLIGGPLSWYSDPGLAGVSLTGGLSYKEDTKELVVAKAGVYYVFFQLELRRVVAGEGSGSVSLALHLQPLRSAAGAAALALTVDLPPASSEARNSAXGFQGRLLHLSAGQRLGVHLHTEARARHAWQLTQGATVLGLFRVTPEIPAGLPSPRSE

SEQ ID NO: 225 - protein, 174 aa, Artificial sequence
  synthetic sequence
  VARIANT (130)..(130): The amino acid at position 130 is any amino acid other than Gln. In some cases, it is Ala.
PAGLLDLRQGMFAQLVAQNVLLIGGPLSWYSDPGLAGVSLTGGLSYKEDTKELVVAKAGVYYVFFQLELRRVVAGEGSGSVSLALHLQPLRSAAGAAALALTVDLPPASSEARNSAFGFQGRLLHLSAGXRLGVHLHTEARARHAWQLTQGATVLGLFRVTPEIPAGLPSPRSE

SEQ ID NO: 226 - protein, 174 aa, Artificial sequence
  synthetic sequence
  VARIANT (131)..(131): The amino acid at position 131 is any amino acid other than Arg. In some cases, it is Ala.
PAGLLDLRQGMFAQLVAQNVLLIGGPLSWYSDPGLAGVSLTGGLSYKEDTKELVVAKAGVYYVFFQLELRRVVAGEGSGSVSLALHLQPLRSAAGAAALALTVDLPPASSEARNSAFGFQGRLLHLSAGQXLGVHLHTEARARHAWQLTQGATVLGLFRVTPEIPAGLPSPRSE

SEQ ID NO: 227 - protein, 174 aa, Artificial sequence
  synthetic sequence
  VARIANT (132)..(132): The amino acid at position 132 is any amino acid other than Leu. In some cases, it is Ala.
PAGLLDLRQGMFAQLVAQNVLLIGGPLSWYSDPGLAGVSLTGGLSYKEDTKELVVAKAGVYYVFFQLELRRVVAGEGSGSVSLALHLQPLRSAAGAAALALTVDLPPASSEARNSAFGFQGRLLHLSAGQRXGVHLHTEARARHAWQLTQGATVLGLFRVTPEIPAGLPSPRSE

SEQ ID NO: 228 - protein, 174 aa, Artificial sequence
  synthetic sequence
  VARIANT (133)..(133): The amino acid at position 133 is any amino acid other than Gly. In some cases, it is Ala.
PAGLLDLRQGMFAQLVAQNVLLIGGPLSWYSDPGLAGVSLTGGLSYKEDTKELVVAKAGVYYVFFQLELRRVVAGEGSGSVSLALHLQPLRSAAGAAALALTVDLPPASSEARNSAFGFQGRLLHLSAGQRLXVHLHTEARARHAWQLTQGATVLGLFRVTPEIPAGLPSPRSE

SEQ ID NO: 229 - protein, 174 aa, Artificial sequence
  synthetic sequence
  VARIANT (134)..(134): The amino acid at position 134 is any amino acid other than Val. In some cases, it is Ala.
PAGLLDLRQGMFAQLVAQNVLLIGGPLSWYSDPGLAGVSLTGGLSYKEDTKELVVAKAGVYYVFFQLELRRVVAGEGSGSVSLALHLQPLRSAAGAAALALTVDLPPASSEARNSAFGFQGRLLHLSAGQRLGXHLHTEARARHAWQLTQGATVLGLFRVTPEIPAGLPSPRSE

SEQ ID NO: 230 - protein, 174 aa, Artificial sequence
  synthetic sequence
  VARIANT (135)..(135): The amino acid at position 135 is any amino acid other than His. In some cases, it is Ala.
PAGLLDLRQGMFAQLVAQNVLLIGGPLSWYSDPGLAGVSLTGGLSYKEDTKELVVAKAGVYYVFFQLELRRVVAGEGSGSVSLALHLQPLRSAAGAAALALTVDLPPASSEARNSAFGFQGRLLHLSAGQRLGVXLHTEARARHAWQLTQGATVLGLFRVTPEIPAGLPSPRSE

SEQ ID NO: 231 - protein, 174 aa, Artificial sequence
  synthetic sequence
  VARIANT (136)..(136): The amino acid at position 136 is any amino acid other than Leu. In some cases, it is Ala.
PAGLLDLRQGMFAQLVAQNVLLIGGPLSWYSDPGLAGVSLTGGLSYKEDTKELVVAKAGVYYVFFQLELRRVVAGEGSGSVSLALHLQPLRSAAGAAALALTVDLPPASSEARNSAFGFQGRLLHLSAGQRLGVHXHTEARARHAWQLTQGATVLGLFRVTPEIPAGLPSPRSE

SEQ ID NO: 232 - protein, 174 aa, Artificial sequence
  synthetic sequence
  VARIANT (137)..(137): The amino acid at position 137 is any amino acid other than His. In some cases, it is Ala.
PAGLLDLRQGMFAQLVAQNVLLIGGPLSWYSDPGLAGVSLTGGLSYKEDTKELVVAKAGVYYVFFQLELRRVVAGEGSGSVSLALHLQPLRSAAGAAALALTVDLPPASSEARNSAFGFQGRLLHLSAGQRLGVHLXTEARARHAWQLTQGATVLGLFRVTPEIPAGLPSPRSE

SEQ ID NO: 233 - protein, 174 aa, Artificial sequence
  synthetic sequence
  VARIANT (138)..(138): The amino acid at position 138 is any amino acid other than Arg. In some cases, it is Ala.
PAGLLDLRQGMFAQLVAQNVLLIGGPLSWYSDPGLAGVSLTGGLSYKEDTKELVVAKAGVYYVFFQLELRRVVAGEGSGSVSLALHLQPLRSAAGAAALALTVDLPPASSEARNSAFGFQGRLLHLSAGQRLGVHLHXEARARHAWQLTQGATVLGLFRVTPEIPAGLPSPRSE

SEQ ID NO: 234 - protein, 174 aa, Artificial sequence
  synthetic sequence
  VARIANT (139)..(139): The amino acid at position 139 is any amino acid other than Glu. In some cases, it is Ala.
PAGLLDLRQGMFAQLVAQNVLLIGGPLSWYSDPGLAGVSLTGGLSYKEDTKELVVAKAGVYYVFFQLELRRVVAGEGSGSVSLALHLQPLRSAAGAAALALTVDLPPASSEARNSAFGFQGRLLHLSAGQRLGVHLHTXARARHAWQLTQGATVLGLFRVTPEIPAGLPSPRSE

SEQ ID NO: 235 - protein, 174 aa, Artificial sequence
  synthetic sequence
  VARIANT (141)..(141): The amino acid at position 141 is any amino acid other than Arg. In some cases, it is Ala.
PAGLLDLRQGMFAQLVAQNVLLIGGPLSWYSDPGLAGVSLTGGLSYKEDTKELVVAKAGVYYVFFQLELRRVVAGEGSGSVSLALHLQPLRSAAGAAALALTVDLPPASSEARNSAFGFQGRLLHLSAGQRLGVHLHTEAXARHAWQLTQGATVLGLFRVTPEIPAGLPSPRSE

SEQ ID NO: 236 - protein, 174 aa, Artificial sequence
  synthetic sequence
  VARIANT (143)..(143): The amino acid at position 143 is any amino acid other than Arg. In some cases, X is Ala.
PAGLLDLRQGMFAQLVAQNVLLIGGPLSWYSDPGLAGVSLTGGLSYKEDTKELVVAKAGVYYVFFQLELRRVVAGEGSGSVSLALHLQPLRSAAGAAALALTVDLPPASSEARNSAFGFQGRLLHLSAGQRLGVHLHTEARAXHAWQLTQGATVLGLFRVTPEIPAGLPSPRSE

SEQ ID NO: 237 - protein, 174 aa, Artificial sequence
  synthetic sequence
  VARIANT (144)..(144): The amino acid at position 144 is any amino acid other than Arg. In some cases, it is Ala.
PAGLLDLRQGMFAQLVAQNVLLIGGPLSWYSDPGLAGVSLTGGLSYKEDTKELVVAKAGVYYVFFQLELRRVVAGEGSGSVSLALHLQPLRSAAGAAALALTVDLPPASSEARNSAFGFQGRLLHLSAGQRLGVHLHTEARARXAWQLTQGATVLGLFRVTPEIPAGLPSPRSE

SEQ ID NO: 238 - protein, 174 aa, Artificial sequence
  synthetic sequence
  VARIANT (146)..(146): The amino acid at position 146 is any amino acid other than Trp. In some cases, it is Ala.
PAGLLDLRQGMFAQLVAQNVLLIGGPLSWYSDPGLAGVSLTGGLSYKEDTKELVVAKAGVYYVFFQLELRRVVAGEGSGSVSLALHLQPLRSAAGAAALALTVDLPPASSEARNSAFGFQGRLLHLSAGQRLGVHLHTEARARHAXQLTQGATVLGLFRVTPEIPAGLPSPRSE

SEQ ID NO: 239 - protein, 174 aa, Artificial sequence
  synthetic sequence
  VARIANT (148)..(148): The amino acid at position 148 is any amino acid other than Leu. In some cases, it is Ala.
PAGLLDLRQGMFAQLVAQNVLLIGGPLSWYSDPGLAGVSLTGGLSYKEDTKELVVAKAGVYYVFFQLELRRVVAGEGSGSVSLALHLQPLRSAAGAAALALTVDLPPASSEARNSAFGFQGRLLHLSAGQRLGVHLHTEARARHAWQXTQGATVLGLFRVTPEIPAGLPSPRSE

SEQ ID NO: 240 - protein, 174 aa, Artificial sequence
  synthetic sequence
  VARIANT (149)..(149): The amino acid at position 149 is any amino acid other than Thr. In some cases, it is Ala.
PAGLLDLRQGMFAQLVAQNVLLIGGPLSWYSDPGLAGVSLTGGLSYKEDTKELVVAKAGVYYVFFQLELRRVVAGEGSGSVSLALHLQPLRSAAGAAALALTVDLPPASSEARNSAFGFQGRLLHLSAGQRLGVHLHTEARARHAWQLXQGATVLGLFRVTPEIPAGLPSPRSE

SEQ ID NO: 241 - protein, 174 aa, Artificial sequence
  synthetic sequence
  VARIANT (150)..(150): The amino acid at position 150 is any amino acid other than Gln. In some cases, it is Ala.
PAGLLDLRQGMFAQLVAQNVLLIGGPLSWYSDPGLAGVSLTGGLSYKEDTKELVVAKAGVYYVFFQLELRRVVAGEGSGSVSLALHLQPLRSAAGAAALALTVDLPPASSEARNSAFGFQGRLLHLSAGQRLGVHLHTEARARHAWQLTXGATVLGLFRVTPEIPAGLPSPRSE

SEQ ID NO: 242 - protein, 174 aa, Artificial sequence
  synthetic sequence
  VARIANT (151)..(151): The amino acid at position 151 is any amino acid other than Gly. In some cases, it is Ala.
PAGLLDLRQGMFAQLVAQNVLLIGGPLSWYSDPGLAGVSLTGGLSYKEDTKELVVAKAGVYYVFFQLELRRVVAGEGSGSVSLALHLQPLRSAAGAAALALTVDLPPASSEARNSAFGFQGRLLHLSAGQRLGVHLHTEARARHAWQLTQXATVLGLFRVTPEIPAGLPSPRSE

SEQ ID NO: 243 - protein, 174 aa, Artificial sequence
  synthetic sequence
  VARIANT (153)..(153): The amino acid at position 153 is any amino acid other than Thr. In some cases, it is Ala.
PAGLLDLRQGMFAQLVAQNVLLIGGPLSWYSDPGLAGVSLTGGLSYKEDTKELVVAKAGVYYVFFQLELRRVVAGEGSGSVSLALHLQPLRSAAGAAALALTVDLPPASSEARNSAFGFQGRLLHLSAGQRLGVHLHTEARARHAWQLTQGAXVLGLFRVTPEIPAGLPSPRSE

SEQ ID NO: 244 - protein, 174 aa, Artificial sequence
  synthetic sequence
  VARIANT (154)..(154): The amino acid at position 154 is any amino acid other than Val. In some cases, it is Ala.
PAGLLDLRQGMFAQLVAQNVLLIGGPLSWYSDPGLAGVSLTGGLSYKEDTKELVVAKAGVYYVFFQLELRRVVAGEGSGSVSLALHLQPLRSAAGAAALALTVDLPPASSEARNSAFGFQGRLLHLSAGQRLGVHLHTEARARHAWQLTQGATXLGLFRVTPEIPAGLPSPRSE

SEQ ID NO: 245 - protein, 133 aa, Homo sapiens [sequence omitted]

SEQ ID NO: 246 - protein, 251 aa, Homo sapiens
ELCDDDPPEIPHATFKAMAYKEGTMLNCECKRGFRRIKSGSLYMLCTGNSSHSSWDNQCQCTSSATRNTTKQVTPQPEEQKERKTTEMQSPMQPVDQASLPGHCREPPPWENEATERIYHFVVGQMVYYQCVQGYRALHRGPAESVCKMTHGKTRWTQPQLICTGEMETSQFPGEEKPQASPEGRPESETSCLVTTTDFQIQTEMAATMETSIFTTEYQVAVAGCVFLLISVLLLSGLTWQRRQRKSRRTI

SEQ ID NO: 247 - protein, 524 aa, Homo sapiens
VNGTSQFTCFYNSRANISCVWSQDGALQDTSCQVHAWPDRRRWNQTCELLPVSQASWACNLILGAPDSQKLTTVDIVTLRVLCREGVRWRVMAIQDFKPFENLRLMAPISLQVVHVETHRCNISWEISQASHYFERHLEFEARTLSPGHTWEEAPLLTLKQKQEWICLETLTPDTQYEFQVRVKPLQGEFTTWSPWSQPLAFRTKPAALGKDTIPWLGHLLVGLSGAFGFIILVYLLINCRNTGPWLKKVLKCNTPDPSKFFSQLSSEHGGDVQKWLSSPFPSSSFSPGGLAPEISPLEVLERDKVTQLLLQQDKVPEPASLSSNHSLTSCFTNQGYFFFHLPDALEIEACQVYFTYDPYSEEDPDEGVAGAPTGSSPQPLQPLSGEDDAYCTFPSRDDLLLFSPSLLGGPSPPSTAPGGSGAGEERMPPSLQERVPRDWDPQPLGPPTPGVPDLVDFQPPPELVLREAGEEVPDAGPREGVSFPWSRPPGQGEFRALNARLPLNTDAYLSLQELQGQDPTHLV

SEQ ID NO: 248 - protein, 347 aa, Homo sapiens
LNTTILTPNGNEDTTADFFLTTMPTDSLSVSTLPLPEVQCFVFNVEYMNCTWNSSSEPQPTNLTLHYWYKNSDNDKVQKCSHYLFSEEITSGCQLQKKEIHLYQTFVVQLQDPREPRRQATQMLKLQNLVIPWAPENLTLHKLSESQLELNWNNRFLNHCLEHLVQYRTDWDHSWTEQSVDYRHKFSLPSVDGQKRYTFRVRSRFNPLCGSAQHWSEWSHPIHWGSNTSKENPFLFALEAVVISVGSMGLIISLLCVYFWLERTMPRIPTLKNLEDLVTEYHGNFSAWSGVSKGLAESLQPDYSERLCLVSEIPPKGGALGEGPGASPCNQHSPYWAPPCYTLKPET

SEQ ID NO: 249 - protein, 133 aa, Artificial sequence
  synthetic sequence
  VARIANT (42)..(42): The amino acid at position 42 is any amino acid other than Phe. In some cases, it is Ala.
APTSSSTKKTQLQLEHLLLDLQMILNGINNYKNPKLTRMLTXKFYMPKKATELKHLQCLEEELKPLEEVLNLAQSKNFHLRPRDLISNINVIVLELKGSETTFMCEYADETATIVEFLNRWITFCQSIISTLT

SEQ ID NO: 250 - protein, 133 aa, Artificial sequence
  synthetic sequence
  VARIANT (20)..(20): The amino acid at position 20 is any amino acid other than Asp. In some cases, it is Ala.
APTSSSTKKTQLQLEHLLLXLQMILNGINNYKNPKLTRMLTFKFYMPKKATELKHLQCLEEELKPLEEVLNLAQSKNFHLRPRDLISNINVIVLELKGSETTFMCEYADETATIVEFLNRWITFCQSIISTLT

SEQ ID NO: 251 - protein, 133 aa, Artificial sequence
  synthetic sequence
  VARIANT (15)..(15): The amino acid at position 15 is any amino acid other than Glu. In some cases, it is Ala.
APTSSSTKKTQLQLXHLLLDLQMILNGINNYKNPKLTRMLTFKFYMPKKATELKHLQCLEEELKPLEEVLNLAQSKNFHLRPRDLISNINVIVLELKGSETTFMCEYADETATIVEFLNRWITFCQSIISTLT

SEQ ID NO: 252 - protein, 133 aa, Artificial sequence
  synthetic sequence
  misc_feature (16)..(16): Xaa can be any naturally occurring amino acid
  VARIANT (26)..(26): The amino acid at position 26 is any amino acid other than His. In some cases, it is Ala, Arg, Asn, Asp, Cys, Glu, Gln, Gly, Ile, Lys, Leu, Met, Phe, Pro, Ser, Thr, Tyr and Val
APTSSSTKKTQLQLEXLLLDLQMILNGINNYKNPKLTRMLTFKFYMPKKATELKHLQCLEEELKPLEEVLNLAQSKNFHLRPRDLISNINVIVLELKGSETTFMCEYADETATIVEFLNRWITFCQSIISTLT

SEQ ID NO: 253 - protein, 133 aa, Artificial sequence
  synthetic sequence
  VARIANT (45)..(45): The amino acid at postion 45 is any amino acid other than Tyr. In some cases, it is Ala.
APTSSSTKKTQLQLEHLLLDLQMILNGINNYKNPKLTRMLTFKFXMPKKATELKHLQCLEEELKPLEEVLNLAQSKNFHLRPRDLISNINVIVLELKGSETTFMCEYADETATIVEFLNRWITFCQSIISTLT

SEQ ID NO: 254 - protein, 133 aa, Artificial sequence
  synthetic sequence
  VARIANT (126)..(126): The amino acid at postion 126 is any amino acid other than Gln. In some cases, it is Ala.
APTSSSTKKTQLQLEHLLLDLQMILNGINNYKNPKLTRMLTFKFYMPKKATELKHLQCLEEELKPLEEVLNLAQSKNFHLRPRDLISNINVIVLELKGSETTFMCEYADETATIVEFLNRWITFCXSIISTLT

SEQ ID NO: 255 - protein, 133 aa, Artificial sequence
  synthetic sequence
  VARIANT (16)..(16): The amino acid at postion 16 is any amino acid other than His. In some cases, it is Ala. In some cases, it is Thr.
  VARIANT (42)..(42): The amino acid at postion 42 is any amino acid other than Phe. In some cases, it is Ala.
APTSSSTKKTQLQLEXLLLDLQMILNGINNYKNPKLTRMLTXKFYMPKKATELKHLQCLEEELKPLEEVLNLAQSKNFHLRPRDLISNINVIVLELKGSETTFMCEYADETATIVEFLNRWITFCQSIISTLT

SEQ ID NO: 256 - protein, 133 aa, Artificial sequence
  synthetic sequence
  VARIANT (20)..(20): The amino acid at postion 20 is any amino acid other than Asp. In some cases, it is Ala.
  VARIANT (42)..(42): The amino acid at postion 42 is any amino acid other than Phe. In some cases, it is Ala.
APTSSSTKKTQLQLEHLLLXLQMILNGINNYKNPKLTRMLTXKFYMPKKATELKHLQCLEEELKPLEEVLNLAQSKNFHLRPRDLISNINVIVLELKGSETTFMCEYADETATIVEFLNRWITFCQSIISTLT

SEQ ID NO: 257 - protein, 133 aa, Artificial sequence
  synthetic sequence
  VARIANT (15)..(15): The amino acid at postion 15 is any amino acid other than Glu. In some cases, it is Ala.
  VARIANT (20)..(20): The amino acid at postion 20 is any amino acid other than Asp. In some cases, it is Ala.
  VARIANT (42)..(42): The amino acid at postion 42 is any amino acid other than Phe. In some cases, it is Ala.
APTSSSTKKTQLQLXHLLLXLQMILNGINNYKNPKLTRMLTXKFYMPKKATELKHLQCLEEELKPLEEVLNLAQSKNFHLRPRDLISNINVIVLELKGSETTFMCEYADETATIVEFLNRWITFCQSIISTLT

SEQ ID NO: 258 - protein, 133 aa, Artificial sequence
  synthetic sequence
  VARIANT (16)..(16): The amino acid at postion 16 is any amino acid other than His. In some cases, it is Ala.
  VARIANT (20)..(20): The amino acid at postion 20 is any amino acid other than Asp. In some cases, it is Ala.
  VARIANT (42)..(42): The amino acid at postion 42 is any amino acid other than Phe. In some cases, it is Ala.
APTSSSTKKTQLQLEXLLLXLQMILNGINNYKNPKLTRMLTXKFYMPKKATELKHLQCLEEELKPLEEVLNLAQSKNFHLRPRDLISNINVIVLELKGSETTFMCEYADETATIVEFLNRWITFCQSIISTLT

SEQ ID NO: 259 - protein, 133 aa, Artificial sequence
  synthetic sequence
  VARIANT (20)..(20): The amino acid at postion 20 is any amino acid other than Asp. In some cases, it is Ala.
  VARIANT (42)..(42): The amino acid at postion 42 is any amino acid other than Phe. In some cases, it is Ala.
  VARIANT (126)..(126): The amino acid at postion 126 is any amino acid other than Gln. In some cases, it is Ala.
APTSSSTKKTQLQLEHLLLXLQMILNGINNYKNPKLTRMLTXKFYMPKKATELKHLQCLEEELKPLEEVLNLAQSKNFHLRPRDLISNINVIVLELKGSETTFMCEYADETATIVEFLNRWITFCXSIISTLT

SEQ ID NO: 260 - protein, 133 aa, Artificial sequence
  synthetic sequence
  VARIANT (20)..(20): The amino acid at postion 20 is any amino acid other than Asp. In some cases, it is Ala.
  VARIANT (42)..(42): The amino acid at postion 42 is any amino acid other than Phe. In some cases, it is Ala.
  VARIANT (45)..(45): The amino acid at postion 45 is any amino acid other than Tyr. In some cases, it is Ala.
APTSSSTKKTQLQLEHLLLXLQMILNGINNYKNPKLTRMLTXKFXMPKKATELKHLQCLEEELKPLEEVLNLAQSKNFHLRPRDLISNINVIVLELKGSETTFMCEYADETATIVEFLNRWITFCQSIISTLT

SEQ ID NO: 261 - protein, 133 aa, Artificial sequence
  synthetic sequence
  VARIANT (16)..(16): The amino acid at postion 16 is any amino acid other than His. In some cases, it is Ala.
  VARIANT (20)..(20): The amino acid at postion 20 is any amino acid other than Asp. In some cases, it is Ala.
  VARIANT (42)..(42): The amino acid at postion 42 is any amino acid other than Phe. In some cases, it is Ala.
  VARIANT (45)..(45): The amino acid at postion 45 is any amino acid other than Tyr. In some cases, it is Ala.
APTSSSTKKTQLQLEXLLLXLQMILNGINNYKNPKLTRMLTXKFXMPKKATELKHLQCLEEELKPLEEVLNLAQSKNFHLRPRDLISNINVIVLELKGSETTFMCEYADETATIVEFLNRWITFCQSIISTLT

SEQ ID NO: 262 - protein, 133 aa, Artificial sequence
  synthetic sequence
  VARIANT (20)..(20): The amino acid at postion 20 is any amino acid other than Asp. In some cases, it is Ala.
  VARIANT (42)..(42): The amino acid at postion 42 is any amino acid other than Phe. In some cases, it is Ala.
  VARIANT (45)..(45): The amino acid at postion 45 is any amino acid other than Tyr. In some cases, it is Ala.
  VARIANT (126)..(126): The amino acid at postion 126 is any amino acid other than Gln. In some cases, it is Ala.
APTSSSTKKTQLQLEHLLLXLQMILNGINNYKNPKLTRMLTXKFXMPKKATELKHLQCLEEELKPLEEVLNLAQSKNFHLRPRDLISNINVIVLELKGSETTFMCEYADETATIVEFLNRWITFCXSIISTLT

SEQ ID NO: 263 - protein, 133 aa, Artificial sequence
  synthetic sequence
  VARIANT (16)..(16): The amino acid at postion 16 is any amino acid other than His. In some cases, it is Ala.
  VARIANT (20)..(20): The amino acid at postion 20 is any amino acid other than Asp. In some cases, it is Ala.
  VARIANT (42)..(42): The amino acid at postion 42 is any amino acid other than Phe. In some cases, it is Ala.
  VARIANT (45)..(45): The amino acid at postion 45 is any amino acid other than Tyr. In some cases, it is Ala.
  VARIANT (126)..(126): The amino acid at postion 126 is any amino acid other than Gln. In some cases, it is Ala.
APTSSSTKKTQLQLEXLLLXLQMILNGINNYKNPKLTRMLTXKFXMPKKATELKHLQCLEEELKPLEEVLNLAQSKNFHLRPRDLISNINVIVLELKGSETTFMCEYADETATIVEFLNRWITFCXSIISTLT

SEQ ID NO: 264 - protein, 133 aa, Artificial sequence
  synthetic sequence
  VARIANT (16)..(16): The amino acid at postion 16 is any amino acid other than His. In some cases, it is Ala.
  VARIANT (42)..(42): The amino acid at postion 42 is any amino acid other than Phe. In some cases, it is Ala.
  VARIANT (126)..(126): The amino acid at postion 126 is any amino acid other than Gln. In some cases, it is Ala.
APTSSSTKKTQLQLEXLLLDLQMILNGINNYKNPKLTRMLTXKFYMPKKATELKHLQCLEEELKPLEEVLNLAQSKNFHLRPRDLISNINVIVLELKGSETTFMCEYADETATIVEFLNRWITFCXSIISTLT

SEQ ID NO: 265 - protein, 112 aa, Artificial sequence
  synthetic sequence
ALDTNYCFSSTEKNCCVRQLYIDFRKDLGWKWIHEPKGYHANFCLGPCPYIWSLDTQYSKVLALYNQHNPGASAAPCCVPQALEPLPIVYYVGRKPKVEQLSNMIVRSCKCS

SEQ ID NO: 266 - protein, 112 aa, Artificial sequence
  synthetic sequence
ALDTNYCFSSTEKNCCVRQLYIDFRKDLGWKWIHEPKGYHANFCLGPCPYIWSLDTQYSKVLALYNQHNPGASAAPSCVPQALEPLPIVYYVGRKPKVEQLSNMIVRSCKCS

SEQ ID NO: 267 - protein, 112 aa, Artificial sequence
  synthetic sequence
ALDAAYCFRNVQDNCCLRPLYIDFKRDLGWKWIHEPKGYNANFCAGACPYLWSSDTQHSRVLSLYNTINPEASASPCCVSQDLEPLTILYYIGKTPKIEQLSNMIVKSCKCS

SEQ ID NO: 268 - protein, 112 aa, Artificial sequence
  synthetic sequence
ALDAAYCFRNVQDNCCLRPLYIDFKRDLGWKWIHEPKGYNANFCAGACPYLWSSDTQHSRVLSLYNTINPEASASPSCVSQDLEPLTILYYIGKTPKIEQLSNMIVKSCKCS

SEQ ID NO: 269 - protein, 112 aa, Artificial sequence [sequence omitted]

SEQ ID NO: 270 - protein, 112 aa, Artificial sequence
  synthetic sequence
ALDTNYCFRNLEENCCVRPLYIDFRQDLGWKWVHEPKGYYANFCSGPCPYLRSADTTHSTVLGLYNTLNPEASASPSCVPQDLEPLTILYYVGRTPKVEQLSNMVVKSCKCS

SEQ ID NO: 271 - protein, 33 aa, Artificial sequence
  synthetic sequence
RMKQIEDKIEEILSKIYHIENEIARIKKLIGER

SEQ ID NO: 272 - protein, 32 aa, Artificial sequence
  synthetic sequence
LSSIEKKQEEQTSWLIWISNELTLIRNELAQS

SEQ ID NO: 273 - protein, 31 aa, Artificial sequence
  synthetic sequence
LSSIEKKLEEITSQLIQISNELTLIRNELAQ

SEQ ID NO: 274 - protein, 31 aa, Artificial sequence
  synthetic sequence
LSSIEKKLEEITSQLIQIRNELTLIRNELAQ

SEQ ID NO: 275 - protein, 31 aa, Artificial sequence
  synthetic sequence
LSSIEKKLEEITSQLQQIRNELTLIRNELAQ

SEQ ID NO: 276 - protein, 31 aa, Artificial sequence
  synthetic sequence
LSSLEKKLEELTSQLIQLRNELTLLRNELAQ

SEQ ID NO: 277 - protein, 31 aa, Artificial sequence
  synthetic sequence
ISSLEKKIEELTSQIQQLRNEITLLRNEIAQ

SEQ ID NO: 278 - protein, 47 aa, Artificial sequence
  synthetic sequence
LEIEAAFLERENTALETRVAELRQRVQRLRNRVSQYRTRYGPLGGGK

SEQ ID NO: 279 - protein, 64 aa, Artificial sequence
  synthetic sequence
VTAFSNMDDMLQKAHLVIEGTFIYLRDSTEFFIRVRDGWKKLQLGELIPIPADSPPPPALSSNP

SEQ ID NO: 280 - protein, 31 aa, Artificial sequence
  synthetic sequence
LKSVENRLAVVENQLKTVIEELKTVKDLLSN

SEQ ID NO: 281 - protein, 31 aa, Artificial sequence
  synthetic sequence
LARIEEKLKTIKAQLSEIASTLNMIREQLAQ

SEQ ID NO: 282 - protein, 31 aa, Artificial sequence
  synthetic sequence
VSRLEEKVKTLKSQVTELASTVSLLREQVAQ

SEQ ID NO: 283 - protein, 30 aa, Artificial sequence
  synthetic sequence
IQSEKKIEDISSLIGQIQSEITLIRNEIAQ

SEQ ID NO: 284 - protein, 31 aa, Artificial sequence
  synthetic sequence
LMSLEKKLEELTQTLMQLQNELSMLKNELAQ

SEQ ID NO: 285 - protein, 18 aa, Artificial sequence
  synthetic sequence
VDLEGSTSNGRQCAGIRL

SEQ ID NO: 286 - protein, 27 aa, Artificial sequence
  synthetic sequence
EDDVTTTEELAPALVPPPKGTCAGWMA

SEQ ID NO: 287 - protein, 27 aa, Artificial sequence
  synthetic sequence
GHDQETTTQGPGVLLPLPKGACTGQMA

SEQ ID NO: 288 - protein, 9 aa, Artificial sequence
  synthetic sequence
YPYDVPDYA

SEQ ID NO: 289 - protein, 8 aa, Artificial sequence
  synthetic sequence
DYKDDDDK

SEQ ID NO: 290 - protein, 10 aa, Artificial sequence
  synthetic sequence
EQKLISEEDL

SEQ ID NO: 291 - protein, 5 aa, Artificial sequence
  synthetic sequence
HHHHH

SEQ ID NO: 292 - protein, 6 aa, Artificial sequence
  synthetic sequence
HHHHHH

SEQ ID NO: 293 - protein, 8 aa, Artificial sequence
  synthetic sequence
WSHPQFEK

SEQ ID NO: 294 - protein, 5 aa, Artificial sequence
  synthetic sequence
RYIRS

SEQ ID NO: 295 - protein, 4 aa, Artificial sequence
  synthetic sequence
FHHT

SEQ ID NO: 296 - protein, 17 aa, Artificial sequence
  synthetic sequence
WEAAAREACCRECCARA

SEQ ID NO: 297 - protein, 220 aa, Artificial sequence
  synthetic sequence
FTVTVPKDLYVVEYGSNMTIECKFPVEKQLDLAALIVYWEMEDKNIIQFVHGEEDLKVQHSSYRQRARLLKDQLSLGNAALQITDVKLQDAGVYRCMISYGGADYKRITVKVNAPYNKINQRILVVDPVTSEHELTCQAEGYPKAEVIWTSSDHQVLSGKTTTTNSKREEKLFNVTSTLRINTTTNEIFYCTFRRLDPEENHTAELVIPELPLAHPPNER

SEQ ID NO: 298 - protein, 189 aa, Artificial sequence
  synthetic sequence
IKEEHVIIQAEFYLNPDQSGEFMFDFDGDEIFHVDMAKKETVWRLEEFGRFASFEAQGALANIAVDKANLEIMTKRSNYTPITNVPPEVTVLTNSPVELREPNVLICFIDKFTPPVVNVTWLRNGKPVTTGVSETVFLPREDHLFRKFHYLPFLPSTEDVYDCRVEHWGLDEPLLKHWEFDAPSPLPET

SEQ ID NO: 299 - protein, 226 aa, Artificial sequence
  synthetic sequence
DKTHTCPPCPAPEAAGGPSVFLFPPKPKDTLMISRTPEVTCVVVDVSHEDPEVKFNWYVDGVEVHNAKTKPREEQYNSTYRVVSVLTVLHQDWLNGKEYKCKVSNKALPAPIEKTISKAKGQPREPQVYTLPPSREEMTKNQVSLTCLVKGFYPSDIAVEWESNGQPENNYKTTPPVLDSDGSFFLYSKLTVDKSRWQQGNVFSCSVMHEALHNHYTQKSLSLSPG

SEQ ID NO: 300 - protein, 199 aa, Artificial sequence
  synthetic sequence
GDTRPRFLEQVKHECHFFNGTERVRFLDRYFYHQEEYVRFDSDVGEYRAVTELGRPDAEYWNSQKDLLEQKRAAVDTYCRHNYGVGESFTVQRRVYPEVTVYPAKTQPLQHHNLLVCSVNGFYPASIEVRWFRNGQEEKTGVVSTGLIQNGDWTFQTLVMLETVPRSGEVYTCQVEHPSLTSPLTVEWRARSESAQSKM

SEQ ID NO: 301 - protein, 15 aa, Artificial sequence
  synthetic sequence
GGGGSGGGGSGGGGS

SEQ ID NO: 302 - protein, 20 aa, Artificial sequence
  synthetic sequence
GGGGSGGGGSGGGGSGGGGS

SEQ ID NO: 303 - protein, 13 aa, Artificial sequence
  synthetic sequence
PKYVKQNTLKLAT

SEQ ID NO: 304 - protein, 133 aa, Artificial sequence
  synthetic sequence
APTSSSTKKTQLQLEALLLDLQMILNGINNYKNPKLTRMLTAKFYMPKKATELKHLQCLEEELKPLEEVLNLAQSKNFHLRPRDLISNINVIVLELKGSETTFMCEYADETATIVEFLNRWITFCQSIISTLT

SEQ ID NO: 305 - protein, 92 aa, Artificial sequence
  synthetic sequence
DTRPRFLWQHKFECHFFNGTERVRLLERCIYNQEESVRFDSDVGEYRAVTELGRPDAEYWNSQKDLLEQRRAAVDTYCRHNYGVGESFTVQR

SEQ ID NO: 306 - protein, 84 aa, Artificial sequence
  synthetic sequence
IKEEHVIIQAEFYLNPDQSGEFMFDFDGDEIFHVDMAKKETVWRLEEFGRFASFEAQGALANIAVDKANLEIMTKRSNYTPITN

SEQ ID NO: 307 - protein, 105 aa, Artificial sequence
  synthetic sequence
VPPEVTVLTNSPVELREPNVLICFIDKFTPPVVNVTWLRNGKPVTTGVSETVFLPREDHLFRKFHYLPFLPSTEDVYDCRVEHWGLDEPLLKHWEFDAPSPLPET

SEQ ID NO: 308 - protein, 47 aa, Artificial sequence
  synthetic sequence
LEIRAAFLRQRNTALRTEVAELEQEVQRLENEVSQYETRYGPLGGGK

SEQ ID NO: 309 - protein, 227 aa, Artificial sequence
  synthetic sequence
DKTHTCPPCPAPELLGGPSVFLFPPKPKDTLMISRTPEVTCVVVDVSHEDPEVKFNWYVDGVEVHNAKTKPREEQYASTYRVVSVLTVLHQDWLNGKEYKCKVSNKALPAPIEKTISKAKGQPREPQVYTLPPSREEMTKNQVSLTCLVKGFYPSDIAVEWESNGQPENNYKTTPPVLDSDGSFFLYSKLTVDKSRWQQGNVFSCSVMHEALHNHYTQKSLSLSPGK

SEQ ID NO: 310 - protein, 103 aa, Artificial sequence
  synthetic sequence
PKVTVYPSKTQPLQHHNLLVCSVSGFYPGSIEVRWFRNGQEEKAGVVSTGLIQNGDWTFQTLVMLETVPRSGEVYTCQVEHPSVTSPLTVEWRARSESAQSKM

SEQ ID NO: 311 - protein, 105 aa, Artificial sequence
  synthetic sequence
VEPKVTVYPSKTQPLQHHNLLVCSVSGFYPGSIEVRWFRNGQEEKAGVVSTGLIQNGDWTFQTLVMLETVPRSGEVYTCQVEHPSVTSPLTVEWRARSESAQSKM

SEQ ID NO: 312 - protein, 14 aa, Artificial sequence
  synthetic sequence
LPLKMLNIPSINVH

SEQ ID NO: 313 - protein, 105 aa, Artificial sequence
  synthetic sequence
VYPEVTVYPAKTQPLQHHNLLVCSVNGFYPASIEVRWFRNGQEEKTGVVSTGLIQNGDWTFQTLVMLETVPRSGEVYTCQVEHPSLTSPLTVEWRARSESAQSKM

SEQ ID NO: 314 - protein, 93 aa, Artificial sequence
  synthetic sequence
GDTRPRFLWQHKFECHFFNGTERVRLLERCIYNQEESVRFDSDVGEYRAVTELGRPDAEYWNSQKDLLEQRRAAVDTYCRHNYGVGESFTVQR

SEQ ID NO: 315 - protein, 96 aa, Artificial sequence
  synthetic sequence
DTRPRFLWQHKFECHFFNGTERVRLLERCIYNQEESVRFDSDVGEYRAVTELGRPDAEYWNSQKDLLEQRRAAVDTYCRHNYGVGESFTVQRRVEP

SEQ ID NO: 316 - protein, 79 aa, Artificial sequence
  synthetic sequence
IKEEHVIIQAEFYLNPDQSGEFMFDFDGDEIFHVDMAKKETVWRLEEFGRFASFEAQGALANIAVDKANLEIMTKRSNY

SEQ ID NO: 317 - protein, 95 aa, Artificial sequence
  synthetic sequence
EVTVLTNSPVELREPNVLICFIDKFTPPVVNVTWLRNGKPVTTGVSETVFLPREDHLFRKFHYLPFLPSTEDVYDCRVEHWGLDEPLLKHWEFDA

SEQ ID NO: 318 - protein, 227 aa, Artificial sequence
  synthetic sequence
DKTHTCPPCPAPEAAGGPSVFLFPPKPKDTLMISRTPEVTCVVVDVSHEDPEVKFNWYVDGVEVHNAKTKPREEQYNSTYRVVSVLTVLHQDWLNGKEYKCKVSNKALPAPIEKTISKAKGQPREPQVYTLPPSREEMTKNQVSLTCLVKGFYPSDIAVEWESNGQPENNYKTTPPVLDSDGSFFLYSKLTVDKSRWQQGNVFSCSVMHEALHNHYTQKSLSLSPGK

SEQ ID NO: 319 - protein, 95 aa, Artificial sequence
  synthetic sequence
KVTVYPSKTQPLQHHNLLVCSVSGFYPGSIEVRWFRNGQEEKAGVVSTGLIQNGDWTFQTLVMLETVPRSGEVYTCQVEHPSVTSPLTVEWRARS

SEQ ID NO: 320 - protein, 98 aa, Artificial sequence
  synthetic sequence
VPPEVTVLTNSPVELREPNVLICFIDKFTPPVVNVTWLRNGKPVTTGVSETVFLPREDHLFRKFHYLPFLPSTEDVYDCRVEHWGLDEPLLKHWEFDA

SEQ ID NO: 321 - protein, 223 aa, Artificial sequence; identical to SEQ ID NO: 60
  synthetic sequence

SEQ ID NO: 322 - protein, 112 aa, Homo sapiens
FTVRETASTKGPSVFPLAPSSKSTSGGTAALGCLVKDYFPEPVTVSWNSGALTSGVHTFPAVLQSSGLYSLSSVVTVPSSSLGTQTYICNVNHKPSNTKVDKKVEPKSCDKT

SEQ ID NO: 323 - protein, 106 aa, Homo sapiens; identical to SEQ ID NO: 4

SEQ ID NO: 324 - protein, 254 aa, Homo sapiens
MAISGVPVLGFFIIAVLMSAQESWAIKEEHVIIQAEFYLNPDQSGEFMFDFDGDEIFHVDMAKKETVWRLEEFGRFASFEAQGALANIAVDKANLEIMTKRSNYTPITNVPPEVTVLTNSPVELREPNVLICFIDKFTPPVVNVTWLRNGKPVTTGVSETVFLPREDHLFRKFHYLPFLPSTEDVYDCRVEHWGLDEPLLKHWEFDAPSPLPETTENVVCALGLTVGLVGIIIGTIFIIKGLRKSNAAERRGPL

SEQ ID NO: 325 - protein, 266 aa, Homo sapiens [sequence omitted]

SEQ ID NO: 326 - protein, 266 aa, Homo sapiens [sequence omitted]

SEQ ID NO: 327 - protein, 266 aa, Homo sapiens; identical to SEQ ID NO: 51

SEQ ID NO: 328 - protein, 266 aa, Homo sapiens; identical to SEQ ID NO: 90

SEQ ID NO: 329 - protein, 266 aa, Homo sapiens [sequence omitted]

SEQ ID NO: 330 - protein, 266 aa, Homo sapiens [sequence omitted]

SEQ ID NO: 331 - protein, 266 aa, Homo sapiens
MVCLRLPGGSCMAVLTVTLMVLSSPLALAGDTRPRFLEYSTSECHFFNGTERVRYLDRYFHNQEENVRFDSDVGEFRAVTELGRPDAEYWNSQKDLLEQKRGRVDNYCRHNYGVVESFTVQRRVHPKVTVYPSKTQPLQHHNLLVCSVSGFYPGSIEVRWFRNGQEEKTGVVSTGLIHNGDWTFQTLVMLETVPRSGEVYTCQVEHPSVTSPLTVEWRARSESAQSKMLSGVGGFVLGLLFLGAGLFIYFRNQKGHSGLQPRGFLS

SEQ ID NO: 332 - protein, 266 aa, Homo sapiens [sequence omitted]

SEQ ID NO: 333 - protein, 266 aa, Homo sapiens
MVCLKLPGGSCMAALTVTLMVLSSPLALAGDTQPRFLWQGKYKCHFFNGTERVQFLERLFYNQEEFVRFDSDVGEYRAVTELGRPVAESWNSQKDILEDRRGQVDTVCRHNYGVGESFTVQRRVHPEVTVYPAKTQPLQHHNLLVCSVSGFYPGSIEVRWFRNGQEEKAGVVSTGLIQNGDWTFQTLVMLETVPRSGEVYTCQVEHPSVMSPLTVEWRARSESAQSKMLSGVGGFVLGLLFLGAGLFIYFRNQKGHSGLQPTGFLS

SEQ ID NO: 334 - protein, 266 aa, Homo sapiens [sequence omitted]

SEQ ID NO: 335 - protein, 266 aa, Homo sapiens; identical to SEQ ID NO: 92

SEQ ID NO: 336 - protein, 266 aa, Homo sapiens [sequence omitted]

SEQ ID NO: 337 - protein, 266 aa, Homo sapiens [sequence omitted]

SEQ ID NO: 338 - protein, 266 aa, Homo sapiens
MVCLKLPGGSCMAALTVTLTVLSSPLALAGDTQPRFLEQAKCECHFLNGTERVWNLIRYIYNQEEYARYNSDLGEYQAVTELGRPDAEYWNSQKDLLERRRAEVDTYCRYNYGVVESFTVQRRVQPKVTVYPSKTQPLQHHNLLVCSVNGFYPGSIEVRWFRNGQEEKAGVVSTGLIQNGDWTFQTLVMLETVPRSGEVYTCQVEHPSMMSPLTVQWSARSESAQSKMLSGVGGFVLGLLFLGTGLFIYFRNQKGHSGLQPTGLLS

SEQ ID NO: 339 - protein, 266 aa, Homo sapiens
MVCLKLPGGSYMAKLTVTLMVLSSPLALAGDTRPRFLQQDKYECHFFNGTERVRFLHRDIYNQEEDLRFDSDVGEYRAVTELGRPDAEYWNSQKDFLEDRRAAVDTYCRHNYGVGESFTVQRRVEPKVTVYPARTQTLQHHNLLVCSVNGFYPGSIEVRWFRNSQEEKAGVVSTGLIQNGDWTFQTLVMLETVPRSGEVYTCQVEHPSVTSPLTVEWRAQSESAQSKMLSGVGGFVLGLLFLGAGLFIYFKNQKGHSGLHPTGLVS

SEQ ID NO: 340 - protein, 261 aa, Homo sapiens
MGHEQNQGAALLQMLPLLWLLPHSWAVPEAPTPMWPDDLQNHTFLHTVYCQDGSPSVGLSEAYDEDQLFFFDFSQNTRVPRLPEFADWAQEQGDAPAILFDKEFCEWMIQQIGPKLDGKIPVSRGFPIAEVFTLKPLEFGKPNTLVCFVSNLFPPMLTVNWQHHSVPVEGFGPTFVSAVDGLSFQAFSYLNFTPEPSDIFSCIVTHEIDRYTAIAYWVPRNALPSDLLENVLCGVAFGLGVLGIIVGIVLIIYFRKPCSGD

SEQ ID NO: 341 - protein, 263 aa, Homo sapiens
MITFLPLLLGLSLGCTGAGGFVAHVESTCLLDDAGTPKDFTYCISFNKDLLTCWDPEENKMAPCEFGVLNSLANVLSQHLNQKDTLMQRLRNGLQNCATHTQPFWGSLTNRTRPPSVQVAKTTPFNTREPVMLACYVWGFYPAEVTITWRKNGKLVMPHSSAHKTAQPNGDWTYQTLSHLALTPSYGDTYTCVVEHTGAPEPILRDWTPGLSPMQTLKVSVSAVTLGLGLIIFSLGVISWRRAGHSSYTPLPGSNYSEGWHIS

SEQ ID NO: 342 - protein, 250 aa, Homo sapiens
MALRAGLVLGFHTLMTLLSPQEAGATKADHMGSYGPAFYQSYGASGQFTHEFDEEQLFSVDLKKSEAVWRLPEFGDFARFDPQGGLAGIAAIKAHLDILVERSNRSRAINVPPRVTVLPKSRVELGQPNILICIVDNIFPPVINITWLRNGQTVTEGVAQTSFYSQPDHLFRKFHYLPFVPSAEDVYDCQVEHWGLDAPLLRHWELQVPIPPPDAMETLVCALGLAIGLVGFLVGTVLIIMGTYVSSVPR

SEQ ID NO: 343 - protein, 273 aa, Homo sapiens
MGSGWVPWVVALLVNLTRLDSSMTQGTDSPEDFVIQAKADCYFTNGTEKVQFVVRFIFNLEEYVRFDSDVGMFVALTKLGQPDAEQWNSRLDLLERSRQAVDGVCRHNYRLGAPFTVGRKVQPEVTVYPERTPLLHQHNLLHCSVTGFYPGDIKIKWFLNGQEERAGVMSTGPIRNGDWTFQTVVMLEMTPELGHVYTCLVDHSSLLSPVSVEWRAQSEYSWRKMLSGIAAFLLGLIFLLVGIVIQLRAQKGYVRTQMSGNEVSRAVLLPQSC

SEQ ID NO: 344 - protein, 260 aa, Homo sapiens
MRPEDRMFHIRAVILRALSLAFLLSLRGAGAIKADHVSTYAAFVQTHRPTGEFMFEFDEDEMFYVDLDKKETVWHLEEFGQAFSFEAQGGLANIAILNNNLNTLIQRSNHTQATNDPPEVTVFPKEPVELGQPNTLICHIDKFFPPVLNVTWLCNGELVTEGVAESLFLPRTDYSFHKFHYLTFVPSAEDFYDCRVEHWGLDQPLLKHWEAQEPIQMPETTETVLCALGLVLGLVGIIVGTVLIIKSLRSGHDPRAQGTL

SEQ ID NO: 345 - protein, 258 aa, Homo sapiens
MMVLQVSAAPRTVALTALLMVLLTSVVQGRATPENYLFQGRQECYAFNGTQRFLERYIYNREEFARFDSDVGEFRAVTELGRPAAEYWNSQKDILEEKRAVPDRMCRHNYELGGPMTLQRRVQPRVNVSPSKKGPLQHHNLLVCHVTDFYPGSIQVRWFLNGQEETAGVVSTNLIRNGDWTFQILVMLEMTPQQGDVYTCQVEHTSLDSPVTVEWKAQSDSARSKTLTGAGGFVLGLIICGVGIFMHRRSKKVQRGSA

SEQ ID NO: 346 - protein, 255 aa, Artificial sequence
  synthetic sequence
MILNKALLLGALALTTVMSPCGGEDIVADHVASCGVNLYQFYGPSGQYTHEFDGDEQFYVDLERKETAWRWPEFSKFGGFDPQGALRNMAVAKHNLNIMIKRYNSTAATNEVPEVTVFSKSPVTLGQPNTLICLVDNIFPPVVNITWLSNGQSVTEGVSETSFLSKSDHSFFKISYLTFLPSADEIYDCKVEHWGLDQPLLKHWEPEIPAPMSELTETVVCALGLSVGLMGIVVGTVFIIQGLRSVGASRHQGPL

SEQ ID NO: 347 - protein, 254 aa, Homo sapiens
MILNKALLLGALALTAVMSPCGGEDIVADHVASYGVNFYQSHGPSGQYTHEFDGDEEFYVDLETKETVWQLPMFSKFISFDPQSALRNMAVGKHTLEFMMRQSNSTAATNEVPEVTVFSKFPVTLGQPNTLICLVDNIFPPVVNITWLSNGHSVTEGVSETSFLSKSDHSFFKISYLTFLPSADEIYDCKVEHWGLDEPLLKHWEPEIPAPMSELTETLVCALGLSVGLMGIVVGTVFIIQGLRSVGASRHQGL

SEQ ID NO: 348 - protein, 269 aa, Homo sapiens
MSWKKALRIPGDLRVATVTLMLAMLSSLLAEGRDSPEDFVFQFKGMCYFTNGTERVRLVTRYIYNREEYARFDSDVGVYRAVTPQGRPDAEYWNSQKEVLEGTRAELDTVCRHNYEVAFRGILQRRVEPTVTISPSRTEALNHHNLLVCSVTDFYPGQIKVRWFRNDQEETAGVVSTPLIRNGDWTFQILVMLEMTPQRGDVYTCHVEHPSLQSPITVEWRAQSESAQSKMLSGVGGFVLGLIFLGLGLIIRQRSQKGPQGPPPAGLLH

SEQ ID NO: 349 - protein, 261 aa, Homo sapiens; identical to SEQ ID NO: 96

SEQ ID NO: 350 - protein, 227 aa, Homo sapiens
MALQIPGGFWAAAVTVMLVMLSTPVAEARDFPKDFLVQFKGMCYFTNGTERVRGVARYIYNREEYGRFDSDVGEFQAVTELGRSIEDWNNYKDFLEQERAAVDKVCRHNYEAELRTTLQRQVEPTVTISPSRTEALNHHNLLVCSVTDFYPAQIKVRWFRNDQEETAGVVSTSLIRNGDWTFQILVMLEITPQRGDIYTCQVEHPSLQSPITVEWRPRGPPPAGLLH

SEQ ID NO: 351 - protein, 264 aa, Homo sapiens
MALQIPGGFWAAAVTVMLVMLSTPVAEARDFPKDFLVQFKGMCYFTNGTERVRGVARYIYNREEYGRFDSDVGEFQAVTELGRSIEDWNNYKDFLEQERAAVDKVCRHNYEAELRTTLQRQVEPTVTISPSRTEALNHHNLLVCSVTDFYPAQIKVRWFRNDQEETAGVVSTSLIRNGDWTFQILVMLEITPQRGDIYTCQVEHPSLQSPITVEWRAQSESAQSKMLSGIGGFVLGLIFLGLGLIIRHRGQKGPRGPPPAGLLH

SEQ ID NO: 352 - protein, 227 aa, Artificial sequence
  synthetic sequence
DKTHTCPPCPAPELLGGPSVFLFPPKPKDTLMISRTPEVTCVVVDVSHEDPEVKFNWYVDGVEVHNAKTKPREEQYNSTYRVVSVLTVLHQDWLNGKEYKCKVSNKALPAPIEKTISKAKGQPREPQVYTLPPSRDELTKNQVSLTCLVKGFYPSDIAVEWESNGQPENNYKTTPPVLDSDGSFFLYSKLTVDKSRWQQGNVFSCSVMHEALHNHYTQKSLSLSPGK

SEQ ID NO: 353 - protein, 325 aa, Homo sapiens
STKGPSVFPLAPCSRSTSESTAALGCLVKDYFPEPVTVSWNSGALTSGVHTFPAVLQSSGLYSLSSVVTVPSSNFGTQTYTCNVDHKPSNTKVDKTVERKCCVECPPCPAPPVAGPSVFLFPPKPKDTLMISRTPEVTCVVVDVSHEDPEVQFNWYVDGVEVHNAKTKPREEQFNSTFRVVSVLTVVHQDWLNGKEYKCKVSNKGLPAPIEKTISKTKGQPREPQVYTLPPSREEMTKNQVSLTCLVKGFYPSDIAVEWESNGQPENNYKTTPPMLDSDGSFFLYSKLTVDKSRWQQGNVFSCSVMHEALHNHYTQKSLSLSPGK

SEQ ID NO: 354 - protein, 246 aa, Homo sapiens
HKPSNTKVDKRVELKTPLGDTTHTCPPCPAPELLGGPSVFLFPPKPKDTLMISRTPEVTCVVVDVSHEDPEVKFNWYVDGVEVHNAKTKPREEQYNSTYRVVSVLTVLHQDWLNGKEYKCKVSNKALPAPIEKTISKAKGQPREPQVYTLPPSRDELTKNQVSLTCLVKGFYPSDIAVEWESNGQPENNYKTTPPVLDSDGSFFLYSKLTVDKSRWQQGNVFSCSVMHEALHNHYTQKSLSLSPGK

SEQ ID NO: 355 - protein, 383 aa, Homo sapiens
PTKAPDVFPIISGCRHPKDNSPVVLACLITGYHPTSVTVTWYMGTQSQPQRTFPEIQRRDSYYMTSSQLSTPLQQWRQGEYKCVVQHTASKSKKEIFRWPESPKAQASSVPTAQPQAEGSLAKATTAPATTRNTGRGGEEKKKEKEKEEQEERETKTPECPSHTQPLGVYLLTPAVQDLWLRDKATFTCFVVGSDLKDAHLTWEVAGKVPTGGVEEGLLERHSNGSQSQHSRLTLPRSLWNAGTSVTCTLNHPSLPPQRLMALREPAAQAPVKLSLNLLASSDPPEAASWLLCEVSGFSPPNILLMWLEDQREVNTSGFAPARPPPQPRSTTFWAWSVLRVPAPPSPQPATYTCVVSHEDSRTLLNASRSLEVSYVTDHGPMK

SEQ ID NO: 356 - protein, 276 aa, Homo sapiens
VTSTLTIKZSDWLGESMFTCRVDHRGLTFQQNASSMCVPDQDTAIRVFAIPPSFASIFLTKSTKLTCLVTDLTTYBSVTISWTREENGAVKTHTNISESHPNATFSAVGEASICEDBDWSGERFTCTVTHTDLPSPLKQTISRPKGVALHRPBVYLLPPARZZLNLRESATITCLVTGFSPADVFVEWMQRGEPLSPQKYVTSAPMPEPQAPGRYFAHSILTVSEEEWNTGGTYTCVVAHEALPNRVTERTVDKSTGKPTLYNVSLVMSDTAGTCY

SEQ ID NO: 357 - protein, 353 aa, Homo sapiens
ASPTSPKVFPLSLCSTQPDGNVVIACLVQGFFPQEPLSVTWSESGQGVTARNFPPSQDASGDLYTTSSQLTLPATQCLAGKSVTCHVKHYTNPSQDVTVPCPVPSTPPTPSPSTPPTPSPSCCHPRLSLHRPALEDLLLGSEANLTCTLTGLRDASGVTFTWTPSSGKSAVQGPPERDLCGCYSVSSVLPGCAEPWNHGKTFTCTAAYPESKTPLTATLSKSGNTFRPEVHLLPPPSEELALNELVTLTCLARGFSPKDVLVRWLQGSQELPREKYLTWASRQEPSQGTTTFAVTSILRVAAEDWKKGDTFSCMVGHEALPLAFTQKTIDRLAGKPTHVNVSVVMAEVDGTCY

SEQ ID NO: 358 - protein, 222 aa, Homo sapiens
ADPCDSNPRGVSAYLSRPSPFDLFIRKSPTITCLVVDLAPSKGTVNLTWSRASGKPVNHSTRKEEKQRNGTLTVTSTLPVGTRDWIEGETYQCRVTHPHLPRALMRSTTKTSGPRAAPEVYAFATPEWPGSRDKRTLACLIQNFMPEDISVQWLHNEVQLPDARHSTTQPRKTKGSGFFVFSRLEVTRAEWEQKDEFICRAVHEAASPSQTVQRAVSVNPGK

SEQ ID NO: 359 - protein, 327 aa, Homo sapiens
ASTKGPSVFPLAPCSRSTSESTAALGCLVKDYFPEPVTVSWNSGALTSGVHTFPAVLQSSGLYSLSSVVTVPSSSLGTKTYTCNVDHKPSNTKVDKRVESKYGPPCPSCPAPEFLGGPSVFLFPPKPKDTLMISRTPEVTCVVVDVSQEDPEVQFNWYVDGVEVHNAKTKPREEQFNSTYRVVSVLTVLHQDWLNGKEYKCKVSNKGLPSSIEKTISKAKGQPREPQVYTLPPSQEEMTKNQVSLTCLVKGFYPSDIAVEWESNGQPENNYKTTPPVLDSDGSFFLYSRLTVDKSRWQEGNVFSCSVMHEALHNHYTQKSLSLSLGK

SEQ ID NO: 360 - protein, 227 aa, Homo sapiens
DKTHTCPPCPAPELLGGPSVFLFPPKPKDTLMISRTPEVTCVVVDVSHEDPEVKFNWYVDGVEVHNAKTKPREEQYNSTYRVVSVLTVLHQDWLNGKEYKCKVSNKALPAPIEKTISKAKGQPREPQVYTLPPSREEMTKNQVSLTCLVKGFYPSDIAVEWESNGQPENNYKTTPPVLDSDGSFFLYSKLTVDKSRWQQGNVFSCSVMHEALHNHYTQKSLSLSPGK

SEQ ID NO: 361 - protein, 227 aa, Homo sapiens
DKTHTCPPCPAPEFEGGPSVFLFPPKPKDTLMISRTPEVTCVVVDVSHEDPEVKFNWYVDGVEVHNAKTKPREEQYNSTYRVVSVLTVLHQDWLNGKEYKCKVSNKALPASIEKTISKAKGQPREPQVYTLPPSREEMTKNQVSLTCLVKGFYPSDIAVEWESNGQPENNYKTTPPVLDSDGSFFLYSKLTVDKSRWQQGNVFSCSVMHEALHNHYTQKSLSLSPGK

SEQ ID NO: 362 - protein, 227 aa, Homo sapiens; identical to SEQ ID NO: 309

SEQ ID NO: 363 - protein, 227 aa, Homo sapiens; identical to SEQ ID NO: 318

SEQ ID NO: 364 - protein, 493 aa, Artificial sequence
  synthetic sequence
MYRMQLLSCIALSLALVTNSAPTSSSTKKTQLQLEALLLDLQMILNGINNYKNPKLTRMLTAKFYMPKKATELKHLQCLEEELKPLEEVLNLAQSKNFHLRPRDLISNINVIVLELKGSETTFMCEYADETATIVEFLNRWITFCQSIISTLTGGGGSGGGGSGGGGSGGGGSAPTSSSTKKTQLQLEALLLDLQMILNGINNYKNPKLTRMLTAKFYMPKKATELKHLQCLEEELKPLEEVLNLAQSKNFHLRPRDLISNINVIVLELKGSETTFMCEYADETATIVEFLNRWITFCQSIISTLTGGGGSGGGGSGGGGSGGGGSVEPKVTVYPSKTQPLQHHNLLVCSVSGFYPGSIEVRWFRNGQEEKAGVVSTGLIQNGDWTFQTLVMLETVPRSGEVYTCQVEHPSVTSPLTVEWRARSESAQSKMGGGGSGGGGSGGGGSLEIEAAFLERENTALETRVAELRQRVQRLRNRVSQYRTRYGPLGGGK

SEQ ID NO: 365 - DNA, 1485 bp, Artificial sequence
  synthetic sequence
atgtacaggatgcaactcctgtcttgcattgcactaagtcttgcacttgtcacaaacagtgcacctacttcaagttctacaaagaaaacacagctacaactggaggcattactgctggatttacagatgattttgaatggaattaataattacaagaatcccaaactcaccaggatgctcacagcaaagttttacatgcccaagaaggccacagaactgaaacatcttcagtgtctagaagaagaactcaaacctctggaggaagtgctaaatttagctcaaagcaaaaactttcacttaagacccagggacttaatcagcaatatcaacgtaatagttctggaactaaagggatctgaaacaacattcatgtgtgaatatgctgatgagacagcaaccattgtagaatttctgaacagatggattaccttttgtcaaagcatcatctcaacactgactggaggcggaggatctggtggtggaggttctggtggtgggggatctggaggcggaggatctgcacctacttcaagttctacaaagaaaacacagctacaactggaggcattactgctggatttacagatgattttgaatggaattaataattacaagaatcccaaactcaccaggatgctcacagcaaagttttacatgcccaagaaggccacagaactgaaacatcttcagtgtctagaagaagaactcaaacctctggaggaagtgctaaatttagctcaaagcaaaaactttcacttaagacccagggacttaatcagcaatatcaacgtaatagttctggaactaaagggatctgaaacaacattcatgtgtgaatatgctgatgagacagcaaccattgtagaatttctgaacagatggattaccttttgtcaaagcatcatctcaacactgactggaggcggaggatctggtggtggaggttctggtggtgggggatctggaggcggaggatctgttgagcctaaggtgactgtgtatccttcaaagacccagcccctgcagcaccacaacctcctggtctgctctgtgagtggtttctatccaggcagcattgaagtcaggtggttccggaacggccaggaagagaaggctggggtggtgtccacaggcctgatccagaatggagattggaccttccagaccctggtgatgctggaaacagttcctcggagtggagaggtttacacctgccaagtggagcacccaagtgtgacgagccctctcacagtggaatggagagcacggtctgaatctgcacagagcaagatgggtggaggtggctcaggaggcggcggcagcggtggaggagggagcctggagatcgaggccgccttcctggagcgggagaacaccgccctggagacccgggtggccgagctgcggcagcgggtgcagcggctgcggaaccgggtgtcccagtaccggacccggtacggccccctgggcggcggcaagtagtga

SEQ ID NO: 366 - protein, 639 aa, Artificial sequence
  synthetic sequence
MYRMQLLSCIALSLALVTNSPKYVKQNTLKLATGGGGSGSGGGGSGGGGGDTRPRFLWQHKFECHFFNGTERVRLLERCIYNQEESVRFDSDVGEYRAVTELGRPDAEYWNSQKDLLEQRRAAVDTYCRHNYGVGESFTVQRGGGGSIKEEHVIIQAEFYLNPDQSGEFMFDFDGDEIFHVDMAKKETVWRLEEFGRFASFEAQGALANIAVDKANLEIMTKRSNYTPITNVPPEVTVLTNSPVELREPNVLICFIDKFTPPVVNVTWLRNGKPVTTGVSETVFLPREDHLFRKFHYLPFLPSTEDVYDCRVEHWGLDEPLLKHWEFDAPSPLPETGGGGSGGGGSLEIRAAFLRQRNTALRTEVAELEQEVQRLENEVSQYETRYGPLGGGKGGSAAAGGDKTHTCPPCPAPELLGGPSVFLFPPKPKDTLMISRTPEVTCVVVDVSHEDPEVKFNWYVDGVEVHNAKTKPREEQYASTYRVVSVLTVLHQDWLNGKEYKCKVSNKALPAPIEKTISKAKGQPREPQVYTLPPSREEMTKNQVSLTCLVKGFYPSDIAVEWESNGQPENNYKTTPPVLDSDGSFFLYSKLTVDKSRWQQGNVFSCSVMHEALHNHYTQKSLSLSPGKGGSHHHHHHHH

SEQ ID NO: 367 - DNA, 1923 bp, Artificial sequence
  synthetic sequence
atgtacaggatgcaactcctgtcttgcattgcactaagtcttgcacttgtcacaaacagtccgaaatatgtaaaacagaataccctgaaattggcaacaggaggtggcggatccggctccggtggaggtggctcaggaggcggcggcggggacacccgaccacgtttcttgtggcagcataagtttgaatgtcatttcttcaatgggacggagcgggtgcggttgctggaaagatgcatctataaccaagaggagtccgtgcgcttcgacagcgacgtgggggagtaccgggcggtgacggagctggggcggcctgatgccgagtactggaacagccagaaggacctcctggagcagaggcgggccgcggtggacacctactgcagacacaactacggggttggtgagagcttcacagtgcagcggggtggtggaggttcaatcaaagaagaacatgtgatcatccaggccgagttctatctgaatcctgaccaatcaggcgagtttatgtttgactttgatggtgatgagattttccatgtggatatggcaaagaaggagacggtctggcggcttgaagaatttggacgatttgccagctttgaggctcaaggtgcattggccaacatagctgtggacaaagccaacctggaaatcatgacaaagcgctccaactatactccgatcaccaatgtacctccagaggtaactgtgctcacaaacagccctgtggaactgagagagcccaacgtcctcatctgtttcatagacaagttcaccccaccagtggtcaatgtcacgtggcttcgaaatggaaaacctgtcaccacaggagtgtcagagacagtcttcctgcccagggaagaccaccttttccgcaagttccactatctccccttcctgccctcaactgaggacgtttacgactgcagggtggagcactggggcttggatgagcctcttctcaagcactgggagtttgatgctccaagccctctcccagagactggtggaggtggctcaggaggcggcggcagcctggagatccgggccgccttcctgcggcagcggaacaccgccctgcggaccgaggtggccgagctggagcaggaggtgcagcggctggagaacgaggtgtcccagtacgagacccggtacggccccctgggcggcggcaagggcggatcagcagctgcgggtggcgacaaaactcacacatgcccaccgtgcccagcacctgaactcctggggggaccgtcagtcttcctcttccccccaaaacccaaggacaccctcatgatctcccggacccctgaggtcacatgcgtggtggtggacgtgagccacgaagaccctgaggtcaagttcaactggtacgtggacggcgtggaggtgcataatgccaagacaaagccgcgggaggagcagtacgcaagcacgtaccgtgtggtcagcgtcctcaccgtcctgcaccaggactggctgaatggcaaggagtacaagtgcaaggtctccaacaaagccctcccagcccccatcgagaaaaccatctccaaagccaaagggcagccccgagaaccacaggtgtacaccctgcccccatcccgggaggagatgaccaagaaccaggtcagcctgacctgcctggtcaaaggcttctatcccagcgacatcgccgtggagtgggagagcaatgggcagccggagaacaactacaagaccacgcctcccgtgctggactccgacggctccttcttcctctacagcaagctcaccgtggacaagagcagatggcagcaggggaacgtcttctcatgctccgtgatgcacgaggctctgcacaaccactacacgcagaagtccctctccctgtctccgggtaaaggcggatcacatcaccatcaccatcaccatcactagtga

SEQ ID NO: 368 - protein, 711 aa, Artificial sequence
  synthetic sequence
MYRMQLLSCIALSLALVTNSPKYVKQNTLKLATGGGGSGSGGGGSGGGGGDTRPRFLWQHKFECHFFNGTERVRLLERCIYNQEESVRFDSDVGEYRAVTELGRPDAEYWNSQKDLLEQRRAAVDTYCRHNYGVGESFTVQRRVEPGGGGSIKEEHVIIQAEFYLNPDQSGEFMFDFDGDEIFHVDMAKKETVWRLEEFGRFASFEAQGALANIAVDKANLEIMTKRSNYTPITNVPPEVTVLTNSPVELREPNVLICFIDKFTPPVVNVTWLRNGKPVTTGVSETVFLPREDHLFRKFHYLPFLPSTEDVYDCRVEHWGLDEPLLKHWEFDAGGGGSGGGGSKVTVYPSKTQPLQHHNLLVCSVSGFYPGSIEVRWFRNGQEEKAGVVSTGLIQNGDWTFQTLVMLETVPRSGEVYTCQVEHPSVTSPLTVEWRARSGGGGSGGGGSGGGGSGGGGSGGGGSGGGGSAAAGGDKTHTCPPCPAPELLGGPSVFLFPPKPKDTLMISRTPEVTCVVVDVSHEDPEVKFNWYVDGVEVHNAKTKPREEQYASTYRVVSVLTVLHQDWLNGKEYKCKVSNKALPAPIEKTISKAKGQPREPQVYTLPPSREEMTKNQVSLTCLVKGFYPSDIAVEWESNGQPENNYKTTPPVLDSDGSFFLYSKLTVDKSRWQQGNVFSCSVMHEALHNHYTQKSLSLSPGKGGSHHHHHHHH

SEQ ID NO: 369 - DNA, 2139 bp, Artificial sequence
  synthetic sequence
atgtacaggatgcaactcctgtcttgcattgcactaagtcttgcacttgtcacaaacagtccgaaatatgtaaaacagaataccctgaaattggcaacaggaggtggcggatccggctccggtggaggtggctcaggaggcggcggcggggacacccgaccacgtttcttgtggcagcataagtttgaatgtcatttcttcaatgggacggagcgggtgcggttgctggaaagatgcatctataaccaagaggagtccgtgcgcttcgacagcgacgtgggggagtaccgggcggtgacggagctggggcggcctgatgccgagtactggaacagccagaaggacctcctggagcagaggcgggccgcggtggacacctactgcagacacaactacggggttggtgagagcttcacagtgcagcggcgagttgagcctggtggtggaggttcaatcaaagaagaacatgtgatcatccaggccgagttctatctgaatcctgaccaatcaggcgagtttatgtttgactttgatggtgatgagattttccatgtggatatggcaaagaaggagacggtctggcggcttgaagaatttggacgatttgccagctttgaggctcaaggtgcattggccaacatagctgtggacaaagccaacctggaaatcatgacaaagcgctccaactatactccgatcaccaatgtacctccagaggtaactgtgctcacaaacagccctgtggaactgagagagcccaacgtcctcatctgtttcatagacaagttcaccccaccagtggtcaatgtcacgtggcttcgaaatggaaaacctgtcaccacaggagtgtcagagacagtcttcctgcccagggaagaccaccttttccgcaagttccactatctccccttcctgccctcaactgaggacgtttacgactgcagggtggagcactggggcttggatgagcctcttctcaagcactgggagtttgatgctggaggcggaggatctggaggcggaggatctaaggtgactgtgtatccttcaaagacccagcccctgcagcaccacaacctcctggtctgctctgtgagtggtttctatccaggcagcattgaagtcaggtggttccggaacggccaggaagagaaggctggggtggtgtccacaggcctgatccagaatggagattggaccttccagaccctggtgatgctggaaacagttcctcggagtggagaggtttacacctgccaagtggagcacccaagtgtgacgagccctctcacagtggaatggagagcacggtctggaggcggaggatctggaggcggaggatctggtggtggaggttctggtggtgggggatctggaggcggaggatctggaggcggaggatctgcagctgcgggtggcgacaaaactcacacatgcccaccgtgcccagcacctgaactcctggggggaccgtcagtcttcctcttccccccaaaacccaaggacaccctcatgatctcccggacccctgaggtcacatgcgtggtggtggacgtgagccacgaagaccctgaggtcaagttcaactggtacgtggacggcgtggaggtgcataatgccaagacaaagccgcgggaggagcagtacgcaagcacgtaccgtgtggtcagcgtcctcaccgtcctgcaccaggactggctgaatggcaaggagtacaagtgcaaggtctccaacaaagccctcccagcccccatcgagaaaaccatctccaaagccaaagggcagccccgagaaccacaggtgtacaccctgcccccatcccgggaggagatgaccaagaaccaggtcagcctgacctgcctggtcaaaggcttctatcccagcgacatcgccgtggagtgggagagcaatgggcagccggagaacaactacaagaccacgcctcccgtgctggactccgacggctccttcttcctctacagcaagctcaccgtggacaagagcagatggcagcaggggaacgtcttctcatgctccgtgatgcacgaggctctgcacaaccactacacgcagaagtccctctccctgtctccgggtaaaggcggatcacatcaccatcaccatcaccatcactagtga

SEQ ID NO: 370 - protein, 992 aa, Artificial sequence
  synthetic sequence
MYRMQLLSCIALSLALVTNSPKYVKQNTLKLATGGGGSGSGGGGSGGGGGDTRPRFLWQHKFECHFFNGTERVRLLERCIYNQEESVRFDSDVGEYRAVTELGRPDAEYWNSQKDLLEQRRAAVDTYCRHNYGVGESFTVQRRVEPGGGGSIKEEHVIIQAEFYLNPDQSGEFMFDFDGDEIFHVDMAKKETVWRLEEFGRFASFEAQGALANIAVDKANLEIMTKRSNYTPITNVPPEVTVLTNSPVELREPNVLICFIDKFTPPVVNVTWLRNGKPVTTGVSETVFLPREDHLFRKFHYLPFLPSTEDVYDCRVEHWGLDEPLLKHWEFDAGGGGSGGGGSKVTVYPSKTQPLQHHNLLVCSVSGFYPGSIEVRWFRNGQEEKAGVVSTGLIQNGDWTFQTLVMLETVPRSGEVYTCQVEHPSVTSPLTVEWRARSGGGGSGGGGSGGGGSGGGGSAPTSSSTKKTQLQLEALLLDLQMILNGINNYKNPKLTRMLTAKFYMPKKATELKHLQCLEEELKPLEEVLNLAQSKNFHLRPRDLISNINVIVLELKGSETTFMCEYADETATIVEFLNRWITFCQSIISTLTGGGGSGGGGSGGGGSGGGGSAPTSSSTKKTQLQLEALLLDLQMILNGINNYKNPKLTRMLTAKFYMPKKATELKHLQCLEEELKPLEEVLNLAQSKNFHLRPRDLISNINVIVLELKGSETTFMCEYADETATIVEFLNRWITFCQSIISTLTGGGGSAAAGGDKTHTCPPCPAPELLGGPSVFLFPPKPKDTLMISRTPEVTCVVVDVSHEDPEVKFNWYVDGVEVHNAKTKPREEQYASTYRVVSVLTVLHQDWLNGKEYKCKVSNKALPAPIEKTISKAKGQPREPQVYTLPPSREEMTKNQVSLTCLVKGFYPSDIAVEWESNGQPENNYKTTPPVLDSDGSFFLYSKLTVDKSRWQQGNVFSCSVMHEALHNHYTQKSLSLSPGKGGSHHHHHHHH

SEQ ID NO: 371 - DNA, 2982 bp, Artificial sequence
  synthetic sequence
atgtacaggatgcaactcctgtcttgcattgcactaagtcttgcacttgtcacaaacagtccgaaatatgtaaaacagaataccctgaaattggcaacaggaggtggcggatccggctccggtggaggtggctcaggaggcggcggcggggacacccgaccacgtttcttgtggcagcataagtttgaatgtcatttcttcaatgggacggagcgggtgcggttgctggaaagatgcatctataaccaagaggagtccgtgcgcttcgacagcgacgtgggggagtaccgggcggtgacggagctggggcggcctgatgccgagtactggaacagccagaaggacctcctggagcagaggcgggccgcggtggacacctactgcagacacaactacggggttggtgagagcttcacagtgcagcggcgagttgagcctggtggtggaggttcaatcaaagaagaacatgtgatcatccaggccgagttctatctgaatcctgaccaatcaggcgagtttatgtttgactttgatggtgatgagattttccatgtggatatggcaaagaaggagacggtctggcggcttgaagaatttggacgatttgccagctttgaggctcaaggtgcattggccaacatagctgtggacaaagccaacctggaaatcatgacaaagcgctccaactatactccgatcaccaatgtacctccagaggtaactgtgctcacaaacagccctgtggaactgagagagcccaacgtcctcatctgtttcatagacaagttcaccccaccagtggtcaatgtcacgtggcttcgaaatggaaaacctgtcaccacaggagtgtcagagacagtcttcctgcccagggaagaccaccttttccgcaagttccactatctccccttcctgccctcaactgaggacgtttacgactgcagggtggagcactggggcttggatgagcctcttctcaagcactgggagtttgatgctggaggcggaggatctggaggcggaggatctaaggtgactgtgtatccttcaaagacccagcccctgcagcaccacaacctcctggtctgctctgtgagtggtttctatccaggcagcattgaagtcaggtggttccggaacggccaggaagagaaggctggggtggtgtccacaggcctgatccagaatggagattggaccttccagaccctggtgatgctggaaacagttcctcggagtggagaggtttacacctgccaagtggagcacccaagtgtgacgagccctctcacagtggaatggagagcacggtctggaggcggaggatctggtggtggaggttctggtggtgggggatctggaggcggaggatctgcacctacttcaagttctacaaagaaaacacagctacaactggaggcattactgctggatttacagatgattttgaatggaattaataattacaagaatcccaaactcaccaggatgctcacagcaaagttttacatgcccaagaaggccacagaactgaaacatcttcagtgtctagaagaagaactcaaacctctggaggaagtgctaaatttagctcaaagcaaaaactttcacttaagacccagggacttaatcagcaatatcaacgtaatagttctggaactaaagggatctgaaacaacattcatgtgtgaatatgctgatgagacagcaaccattgtagaatttctgaacagatggattaccttttgtcaaagcatcatctcaacactgactggaggcggaggatctggtggtggaggttctggtggtgggggatctggaggcggaggatctgcacctacttcaagttctacaaagaaaacacagctacaactggaggcattactgctggatttacagatgattttgaatggaattaataattacaagaatcccaaactcaccaggatgctcacagcaaagttttacatgcccaagaaggccacagaactgaaacatcttcagtgtctagaagaagaactcaaacctctggaggaagtgctaaatttagctcaaagcaaaaactttcacttaagacccagggacttaatcagcaatatcaacgtaatagttctggaactaaagggatctgaaacaacattcatgtgtgaatatgctgatgagacagcaaccattgtagaatttctgaacagatggattaccttttgtcaaagcatcatctcaacactgactggaggcggaggatctgcagctgcgggtggcgacaaaactcacacatgcccaccgtgcccagcacctgaactcctggggggaccgtcagtcttcctcttccccccaaaacccaaggacaccctcatgatctcccggacccctgaggtcacatgcgtggtggtggacgtgagccacgaagaccctgaggtcaagttcaactggtacgtggacggcgtggaggtgcataatgccaagacaaagccgcgggaggagcagtacgcaagcacgtaccgtgtggtcagcgtcctcaccgtcctgcaccaggactggctgaatggcaaggagtacaagtgcaaggtctccaacaaagccctcccagcccccatcgagaaaaccatctccaaagccaaagggcagccccgagaaccacaggtgtacaccctgcccccatcccgggaggagatgaccaagaaccaggtcagcctgacctgcctggtcaaaggcttctatcccagcgacatcgccgtggagtgggagagcaatgggcagccggagaacaactacaagaccacgcctcccgtgctggactccgacggctccttcttcctctacagcaagctcaccgtggacaagagcagatggcagcaggggaacgtcttctcatgctccgtgatgcacgaggctctgcacaaccactacacgcagaagtccctctccctgtctccgggtaaaggcggatcacatcaccatcaccatcaccatcactagtga

SEQ ID NO: 372 - protein, 887 aa, Artificial sequence
  synthetic sequence
MYRMQLLSCIALSLALVTNSPKYVKQNTLKLATGGGGSGSGGGGSGGGGGDTRPRFLWQHKFECHFFNGTERVRLLERCIYNQEESVRFDSDVGEYRAVTELGRPDAEYWNSQKDLLEQRRAAVDTYCRHNYGVGESFTVQRRVEPGGGGSIKEEHVIIQAEFYLNPDQSGEFMFDFDGDEIFHVDMAKKETVWRLEEFGRFASFEAQGALANIAVDKANLEIMTKRSNYTPITNVPPEVTVLTNSPVELREPNVLICFIDKFTPPVVNVTWLRNGKPVTTGVSETVFLPREDHLFRKFHYLPFLPSTEDVYDCRVEHWGLDEPLLKHWEFDAGGGGSGGGGSGGGGSGGGGSAPTSSSTKKTQLQLEALLLDLQMILNGINNYKNPKLTRMLTAKFYMPKKATELKHLQCLEEELKPLEEVLNLAQSKNFHLRPRDLISNINVIVLELKGSETTFMCEYADETATIVEFLNRWITFCQSIISTLTGGGGSGGGGSGGGGSGGGGSAPTSSSTKKTQLQLEALLLDLQMILNGINNYKNPKLTRMLTAKFYMPKKATELKHLQCLEEELKPLEEVLNLAQSKNFHLRPRDLISNINVIVLELKGSETTFMCEYADETATIVEFLNRWITFCQSIISTLTGGGGSAAAGGDKTHTCPPCPAPELLGGPSVFLFPPKPKDTLMISRTPEVTCVVVDVSHEDPEVKFNWYVDGVEVHNAKTKPREEQYASTYRVVSVLTVLHQDWLNGKEYKCKVSNKALPAPIEKTISKAKGQPREPQVYTLPPSREEMTKNQVSLTCLVKGFYPSDIAVEWESNGQPENNYKTTPPVLDSDGSFFLYSKLTVDKSRWQQGNVFSCSVMHEALHNHYTQKSLSLSPGKGGSHHHHHHHH

SEQ ID NO: 373 - DNA, 2667 bp, Artificial sequence
  synthetic sequence
atgtacaggatgcaactcctgtcttgcattgcactaagtcttgcacttgtcacaaacagtccgaaatatgtaaaacagaataccctgaaattggcaacaggaggtggcggatccggctccggtggaggtggctcaggaggcggcggcggggacacccgaccacgtttcttgtggcagcataagtttgaatgtcatttcttcaatgggacggagcgggtgcggttgctggaaagatgcatctataaccaagaggagtccgtgcgcttcgacagcgacgtgggggagtaccgggcggtgacggagctggggcggcctgatgccgagtactggaacagccagaaggacctcctggagcagaggcgggccgcggtggacacctactgcagacacaactacggggttggtgagagcttcacagtgcagcggcgagttgagcctggtggtggaggttcaatcaaagaagaacatgtgatcatccaggccgagttctatctgaatcctgaccaatcaggcgagtttatgtttgactttgatggtgatgagattttccatgtggatatggcaaagaaggagacggtctggcggcttgaagaatttggacgatttgccagctttgaggctcaaggtgcattggccaacatagctgtggacaaagccaacctggaaatcatgacaaagcgctccaactatactccgatcaccaatgtacctccagaggtaactgtgctcacaaacagccctgtggaactgagagagcccaacgtcctcatctgtttcatagacaagttcaccccaccagtggtcaatgtcacgtggcttcgaaatggaaaacctgtcaccacaggagtgtcagagacagtcttcctgcccagggaagaccaccttttccgcaagttccactatctccccttcctgccctcaactgaggacgtttacgactgcagggtggagcactggggcttggatgagcctcttctcaagcactgggagtttgatgctggaggcggaggatctggtggtggaggttctggtggtgggggatctggaggcggaggatctgcacctacttcaagttctacaaagaaaacacagctacaactggaggcattactgctggatttacagatgattttgaatggaattaataattacaagaatcccaaactcaccaggatgctcacagcaaagttttacatgcccaagaaggccacagaactgaaacatcttcagtgtctagaagaagaactcaaacctctggaggaagtgctaaatttagctcaaagcaaaaactttcacttaagacccagggacttaatcagcaatatcaacgtaatagttctggaactaaagggatctgaaacaacattcatgtgtgaatatgctgatgagacagcaaccattgtagaatttctgaacagatggattaccttttgtcaaagcatcatctcaacactgactggaggcggaggatctggtggtggaggttctggtggtgggggatctggaggcggaggatctgcacctacttcaagttctacaaagaaaacacagctacaactggaggcattactgctggatttacagatgattttgaatggaattaataattacaagaatcccaaactcaccaggatgctcacagcaaagttttacatgcccaagaaggccacagaactgaaacatcttcagtgtctagaagaagaactcaaacctctggaggaagtgctaaatttagctcaaagcaaaaactttcacttaagacccagggacttaatcagcaatatcaacgtaatagttctggaactaaagggatctgaaacaacattcatgtgtgaatatgctgatgagacagcaaccattgtagaatttctgaacagatggattaccttttgtcaaagcatcatctcaacactgactggaggcggaggatctgcagctgcgggtggcgacaaaactcacacatgcccaccgtgcccagcacctgaactcctggggggaccgtcagtcttcctcttccccccaaaacccaaggacaccctcatgatctcccggacccctgaggtcacatgcgtggtggtggacgtgagccacgaagaccctgaggtcaagttcaactggtacgtggacggcgtggaggtgcataatgccaagacaaagccgcgggaggagcagtacgcaagcacgtaccgtgtggtcagcgtcctcaccgtcctgcaccaggactggctgaatggcaaggagtacaagtgcaaggtctccaacaaagccctcccagcccccatcgagaaaaccatctccaaagccaaagggcagccccgagaaccacaggtgtacaccctgcccccatcccgggaggagatgaccaagaaccaggtcagcctgacctgcctggtcaaaggcttctatcccagcgacatcgccgtggagtgggagagcaatgggcagccggagaacaactacaagaccacgcctcccgtgctggactccgacggctccttcttcctctacagcaagctcaccgtggacaagagcagatggcagcaggggaacgtcttctcatgctccgtgatgcacgaggctctgcacaaccactacacgcagaagtccctctccctgtctccgggtaaaggcggatcacatcaccatcaccatcaccatcactagtga

SEQ ID NO: 374 - protein, 640 aa, Artificial sequence
  synthetic sequence
MYRMQLLSCIALSLALVTNSLPLKMLNIPSINVHGGGGSGSGGGGSGGGGGDTRPRFLWQHKFECHFFNGTERVRLLERCIYNQEESVRFDSDVGEYRAVTELGRPAAEYWNSQKDLLEQRRAAVDTYCRHNYGVGESFTVQRGGGGSIKEEHVIIQAEFYLNPDQSGEFMFDFDGDEIFHVDMAKKETVWRLEEFGRFASFEAQGALANIAVDKANLEIMTKRSNYTPITNVPPEVTVLTNSPVELREPNVLICFIDKFTPPVVNVTWLRNGKPVTTGVSETVFLPREDHLFRKFHYLPFLPSTEDVYDCRVEHWGLDEPLLKHWEFDAPSPLPETGGGGSGGGGSLEIRAAFLRQRNTALRTEVAELEQEVQRLENEVSQYETRYGPLGGGKGGSAAAGGDKTHTCPPCPAPELLGGPSVFLFPPKPKDTLMISRTPEVTCVVVDVSHEDPEVKFNWYVDGVEVHNAKTKPREEQYASTYRVVSVLTVLHQDWLNGKEYKCKVSNKALPAPIEKTISKAKGQPREPQVYTLPPSREEMTKNQVSLTCLVKGFYPSDIAVEWESNGQPENNYKTTPPVLDSDGSFFLYSKLTVDKSRWQQGNVFSCSVMHEALHNHYTQKSLSLSPGKGGSHHHHHHHH

SEQ ID NO: 375 - DNA, 1926 bp, Artificial sequence
  synthetic sequence
atgtacaggatgcaactcctgtcttgcattgcactaagtcttgcacttgtcacaaacagtcttccgctcaaaatgcttaacataccttccattaatgtccacggaggtggcggatccggctccggtggaggtggctcaggaggcggcggcggggacacccgaccacgtttcttgtggcagcataagtttgaatgtcatttcttcaatgggacggagcgggtgcggttgctggaaagatgcatctataaccaagaggagtccgtgcgcttcgacagcgacgtgggggagtaccgggcggtgacggagctggggcggcctgcagccgagtactggaacagccagaaggacctcctggagcagaggcgggccgcggtggacacctactgcagacacaactacggggttggtgagagcttcacagtgcagcggggtggtggaggttcaatcaaagaagaacatgtgatcatccaggccgagttctatctgaatcctgaccaatcaggcgagtttatgtttgactttgatggtgatgagattttccatgtggatatggcaaagaaggagacggtctggcggcttgaagaatttggacgatttgccagctttgaggctcaaggtgcattggccaacatagctgtggacaaagccaacctggaaatcatgacaaagcgctccaactatactccgatcaccaatgtacctccagaggtaactgtgctcacaaacagccctgtggaactgagagagcccaacgtcctcatctgtttcatagacaagttcaccccaccagtggtcaatgtcacgtggcttcgaaatggaaaacctgtcaccacaggagtgtcagagacagtcttcctgcccagggaagaccaccttttccgcaagttccactatctccccttcctgccctcaactgaggacgtttacgactgcagggtggagcactggggcttggatgagcctcttctcaagcactgggagtttgatgctccaagccctctcccagagactggtggaggtggctcaggaggcggcggcagcctggagatccgggccgccttcctgcggcagcggaacaccgccctgcggaccgaggtggccgagctggagcaggaggtgcagcggctggagaacgaggtgtcccagtacgagacccggtacggccccctgggcggcggcaagggcggatcagcagctgcgggtggcgacaaaactcacacatgcccaccgtgcccagcacctgaactcctggggggaccgtcagtcttcctcttccccccaaaacccaaggacaccctcatgatctcccggacccctgaggtcacatgcgtggtggtggacgtgagccacgaagaccctgaggtcaagttcaactggtacgtggacggcgtggaggtgcataatgccaagacaaagccgcgggaggagcagtacgcaagcacgtaccgtgtggtcagcgtcctcaccgtcctgcaccaggactggctgaatggcaaggagtacaagtgcaaggtctccaacaaagccctcccagcccccatcgagaaaaccatctccaaagccaaagggcagccccgagaaccacaggtgtacaccctgcccccatcccgggaggagatgaccaagaaccaggtcagcctgacctgcctggtcaaaggcttctatcccagcgacatcgccgtggagtgggagagcaatgggcagccggagaacaactacaagaccacgcctcccgtgctggactccgacggctccttcttcctctacagcaagctcaccgtggacaagagcagatggcagcaggggaacgtcttctcatgctccgtgatgcacgaggctctgcacaaccactacacgcagaagtccctctccctgtctccgggtaaaggcggatcacatcaccatcaccatcaccatcactagtga

SEQ ID NO: 376 - protein, 640 aa, Artificial sequence
  synthetic sequence
MYRMQLLSCIALSLALVTNSPKYVKQNTLKLATGGGGGSGSGGGGSGGGGGDTRPRFLEQVKHECHFFNGTERVRFLDRYFYHQEEYVRFDSDVGEYRAVTELGRPDAEYWNSQKDLLEQKRAAVDTYCRHNYGVGESFTVQRGGGGSIKEEHVIIQAEFYLNPDQSGEFMFDFDGDEIFHVDMAKKETVWRLEEFGRFASFEAQGALANIAVDKANLEIMTKRSNYTPITNVPPEVTVLTNSPVELREPNVLICFIDKFTPPVVNVTWLRNGKPVTTGVSETVFLPREDHLFRKFHYLPFLPSTEDVYDCRVEHWGLDEPLLKHWEFDAPSPLPETGGGGSGGGGSLEIRAAFLRQRNTALRTEVAELEQEVQRLENEVSQYETRYGPLGGGKGGSAAAGGDKTHTCPPCPAPELLGGPSVFLFPPKPKDTLMISRTPEVTCVVVDVSHEDPEVKFNWYVDGVEVHNAKTKPREEQYASTYRVVSVLTVLHQDWLNGKEYKCKVSNKALPAPIEKTISKAKGQPREPQVYTLPPSREEMTKNQVSLTCLVKGFYPSDIAVEWESNGQPENNYKTTPPVLDSDGSFFLYSKLTVDKSRWQQGNVFSCSVMHEALHNHYTQKSLSLSPGKGGSHHHHHHHH

SEQ ID NO: 377 - DNA, 1926 bp, Artificial sequence
  synthetic sequence
atgtacaggatgcaactcctgtcttgcattgcactaagtcttgcacttgtcacaaacagtccgaaatatgtgaaacagaacaccctgaaactggcgaccggtggaggtggcggatccggctccggtggaggtggctcaggaggcggcggcggggacacccgaccacgtttcttggagcaggttaaacatgagtgtcatttcttcaacgggacggagcgggtgcggttcctggacagatacttctatcaccaagaggagtacgtgcgcttcgacagcgacgtgggggagtaccgggcggtgacggagctggggcggcctgatgccgagtactggaacagccagaaggacctcctggagcagaagcgggccgcggtggacacctactgcagacacaactacggggttggtgagagcttcacagtgcagcggggtggtggaggttcaatcaaagaagaacatgtgatcatccaggccgagttctatctgaatcctgaccaatcaggcgagtttatgtttgactttgatggtgatgagattttccatgtggatatggcaaagaaggagacggtctggcggcttgaagaatttggacgatttgccagctttgaggctcaaggtgcattggccaacatagctgtggacaaagccaacctggaaatcatgacaaagcgctccaactatactccgatcaccaatgtacctccagaggtaactgtgctcacaaacagccctgtggaactgagagagcccaacgtcctcatctgtttcatagacaagttcaccccaccagtggtcaatgtcacgtggcttcgaaatggaaaacctgtcaccacaggagtgtcagagacagtcttcctgcccagggaagaccaccttttccgcaagttccactatctccccttcctgccctcaactgaggacgtttacgactgcagggtggagcactggggcttggatgagcctcttctcaagcactgggagtttgatgctccaagccctctcccagagactggtggaggtggctcaggaggcggcggcagcctggagatccgggccgccttcctgcggcagcggaacaccgccctgcggaccgaggtggccgagctggagcaggaggtgcagcggctggagaacgaggtgtcccagtacgagacccggtacggccccctgggcggcggcaagggcggatcagcagctgcgggtggcgacaaaactcacacatgcccaccgtgcccagcacctgaactcctggggggaccgtcagtcttcctcttccccccaaaacccaaggacaccctcatgatctcccggacccctgaggtcacatgcgtggtggtggacgtgagccacgaagaccctgaggtcaagttcaactggtacgtggacggcgtggaggtgcataatgccaagacaaagccgcgggaggagcagtacgcaagcacgtaccgtgtggtcagcgtcctcaccgtcctgcaccaggactggctgaatggcaaggagtacaagtgcaaggtctccaacaaagccctcccagcccccatcgagaaaaccatctccaaagccaaagggcagccccgagaaccacaggtgtacaccctgcccccatcccgggaggagatgaccaagaaccaggtcagcctgacctgcctggtcaaaggcttctatcccagcgacatcgccgtggagtgggagagcaatgggcagccggagaacaactacaagaccacgcctcccgtgctggactccgacggctccttcttcctctacagcaagctcaccgtggacaagagcagatggcagcaggggaacgtcttctcatgctccgtgatgcacgaggctctgcacaaccactacacgcagaagtccctctccctgtctccgggtaaaggcggatcacatcaccatcaccatcaccatcactagtga

SEQ ID NO: 378 - protein, 493 aa, Artificial sequence
  synthetic sequence
MYRMQLLSCIALSLALVTNSAPTSSSTKKTQLQLEALLLDLQMILNGINNYKNPKLTRMLTAKFYMPKKATELKHLQCLEEELKPLEEVLNLAQSKNFHLRPRDLISNINVIVLELKGSETTFMCEYADETATIVEFLNRWITFCQSIISTLTGGGGSGGGGSGGGGSGGGGSAPTSSSTKKTQLQLEALLLDLQMILNGINNYKNPKLTRMLTAKFYMPKKATELKHLQCLEEELKPLEEVLNLAQSKNFHLRPRDLISNINVIVLELKGSETTFMCEYADETATIVEFLNRWITFCQSIISTLTGGGGSGGGGSGGGGSGGGGSVYPEVTVYPAKTQPLQHHNLLVCSVNGFYPASIEVRWFRNGQEEKTGVVSTGLIQNGDWTFQTLVMLETVPRSGEVYTCQVEHPSLTSPLTVEWRARSESAQSKMGGGGSGGGGSGGGGSLEIEAAFLERENTALETRVAELRQRVQRLRNRVSQYRTRYGPLGGGK

SEQ ID NO: 379 - DNA, 1485 bp, Artificial sequence
  synthetic sequence
atgtacaggatgcaactcctgtcttgcattgcactaagtcttgcacttgtcacaaacagtgcacctacttcaagttctacaaagaaaacacagctacaactggaggcattactgctggatttacagatgattttgaatggaattaataattacaagaatcccaaactcaccaggatgctcacagcaaagttttacatgcccaagaaggccacagaactgaaacatcttcagtgtctagaagaagaactcaaacctctggaggaagtgctaaatttagctcaaagcaaaaactttcacttaagacccagggacttaatcagcaatatcaacgtaatagttctggaactaaagggatctgaaacaacattcatgtgtgaatatgctgatgagacagcaaccattgtagaatttctgaacagatggattaccttttgtcaaagcatcatctcaacactgactggaggcggaggatctggtggtggaggttctggtggtgggggatctggaggcggaggatctgcacctacttcaagttctacaaagaaaacacagctacaactggaggcattactgctggatttacagatgattttgaatggaattaataattacaagaatcccaaactcaccaggatgctcacagcaaagttttacatgcccaagaaggccacagaactgaaacatcttcagtgtctagaagaagaactcaaacctctggaggaagtgctaaatttagctcaaagcaaaaactttcacttaagacccagggacttaatcagcaatatcaacgtaatagttctggaactaaagggatctgaaacaacattcatgtgtgaatatgctgatgagacagcaaccattgtagaatttctgaacagatggattaccttttgtcaaagcatcatctcaacactgactggaggcggaggatctggtggtggaggttctggtggtgggggatctggaggcggaggatctgtctatcctgaggtgactgtgtatcctgcaaagacccagcccctgcagcaccacaacctcctggtctgctctgtgaatggtttctatccagccagcattgaagtcaggtggttccggaacggccaggaagagaagactggggtggtgtccacaggcctgatccagaatggagactggaccttccagaccctggtgatgctggaaacagttcctcggagtggagaggtttacacctgccaagtggagcacccaagcctgacgagccctctcacagtggaatggagagcacggtctgaatctgcacagagcaagatgggtggaggtggctcaggaggcggcggcagcggtggaggagggagcctggagatcgaggccgccttcctggagcgggagaacaccgccctggagacccgggtggccgagctgcggcagcgggtgcagcggctgcggaaccgggtgtcccagtaccggacccggtacggccccctgggcggcggcaagtagtga

SEQ ID NO: 380 - protein, 602 aa, Artificial sequence
  synthetic sequence
MYRMQLLSCIALSLALVTNSPKYVKQNTLKLATGGGGSGSGGGGSGGGGGDTRPRFLWQHKFECHFFNGTERVRLLERCIYNQEESVRFDSDVGEYRAVTELGRPDAEYWNSQKDLLEQRRAAVDTYCRHNYGVGESFTVQRGGGGSIKEEHVIIQAEFYLNPDQSGEFMFDFDGDEIFHVDMAKKETVWRLEEFGRFASFEAQGALANIAVDKANLEIMTKRSNYTPITNVPPEVTVLTNSPVELREPNVLICFIDKFTPPVVNVTWLRNGKPVTTGVSETVFLPREDHLFRKFHYLPFLPSTEDVYDCRVEHWGLDEPLLKHWEFDAGGGGSGGGGSGGGGSGGGGSGGGGSGGGGSAAAGGDKTHTCPPCPAPELLGGPSVFLFPPKPKDTLMISRTPEVTCVVVDVSHEDPEVKFNWYVDGVEVHNAKTKPREEQYASTYRVVSVLTVLHQDWLNGKEYKCKVSNKALPAPIEKTISKAKGQPREPQVYTLPPSREEMTKNQVSLTCLVKGFYPSDIAVEWESNGQPENNYKTTPPVLDSDGSFFLYSKLTVDKSRWQQGNVFSCSVMHEALHNHYTQKSLSLSPGKGGSHHHHHHHH

SEQ ID NO: 381 - DNA, 1812 bp, Artificial sequence
  synthetic sequence
atgtacaggatgcaactcctgtcttgcattgcactaagtcttgcacttgtcacaaacagtccgaaatatgtaaaacagaataccctgaaattggcaacaggaggtggcggatccggctccggtggaggtggctcaggaggcggcggcggggacacccgaccacgtttcttgtggcagcataagtttgaatgtcatttcttcaatgggacggagcgggtgcggttgctggaaagatgcatctataaccaagaggagtccgtgcgcttcgacagcgacgtgggggagtaccgggcggtgacggagctggggcggcctgatgccgagtactggaacagccagaaggacctcctggagcagaggcgggccgcggtggacacctactgcagacacaactacggggttggtgagagcttcacagtgcagcggggtggtggaggttcaatcaaagaagaacatgtgatcatccaggccgagttctatctgaatcctgaccaatcaggcgagtttatgtttgactttgatggtgatgagattttccatgtggatatggcaaagaaggagacggtctggcggcttgaagaatttggacgatttgccagctttgaggctcaaggtgcattggccaacatagctgtggacaaagccaacctggaaatcatgacaaagcgctccaactatactccgatcaccaatgtacctccagaggtaactgtgctcacaaacagccctgtggaactgagagagcccaacgtcctcatctgtttcatagacaagttcaccccaccagtggtcaatgtcacgtggcttcgaaatggaaaacctgtcaccacaggagtgtcagagacagtcttcctgcccagggaagaccaccttttccgcaagttccactatctccccttcctgccctcaactgaggacgtttacgactgcagggtggagcactggggcttggatgagcctcttctcaagcactgggagtttgatgctggaggcggaggatctggaggcggaggatctggtggtggaggttctggtggtgggggatctggaggcggaggatctggaggcggaggatctgcagctgcgggtggcgacaaaactcacacatgcccaccgtgcccagcacctgaactcctggggggaccgtcagtcttcctcttccccccaaaacccaaggacaccctcatgatctcccggacccctgaggtcacatgcgtggtggtggacgtgagccacgaagaccctgaggtcaagttcaactggtacgtggacggcgtggaggtgcataatgccaagacaaagccgcgggaggagcagtacgcaagcacgtaccgtgtggtcagcgtcctcaccgtcctgcaccaggactggctgaatggcaaggagtacaagtgcaaggtctccaacaaagccctcccagcccccatcgagaaaaccatctccaaagccaaagggcagccccgagaaccacaggtgtacaccctgcccccatcccgggaggagatgaccaagaaccaggtcagcctgacctgcctggtcaaaggcttctatcccagcgacatcgccgtggagtgggagagcaatgggcagccggagaacaactacaagaccacgcctcccgtgctggactccgacggctccttcttcctctacagcaagctcaccgtggacaagagcagatggcagcaggggaacgtcttctcatgctccgtgatgcacgaggctctgcacaaccactacacgcagaagtccctctccctgtctccgggtaaaggcggatcacatcaccatcaccatcaccatcactagtga

SEQ ID NO: 382 - protein, 491 aa, Artificial sequence
  synthetic sequence
MYRMQLLSCIALSLALVTNSAPTSSSTKKTQLQLEALLLDLQMILNGINNYKNPKLTRMLTAKFYMPKKATELKHLQCLEEELKPLEEVLNLAQSKNFHLRPRDLISNINVIVLELKGSETTFMCEYADETATIVEFLNRWITFCQSIISTLTGGGGSGGGGSGGGGSGGGGSAPTSSSTKKTQLQLEALLLDLQMILNGINNYKNPKLTRMLTAKFYMPKKATELKHLQCLEEELKPLEEVLNLAQSKNFHLRPRDLISNINVIVLELKGSETTFMCEYADETATIVEFLNRWITFCQSIISTLTGGGGSGGGGSGGGGSGGGGSPKVTVYPSKTQPLQHHNLLVCSVSGFYPGSIEVRWFRNGQEEKAGVVSTGLIQNGDWTFQTLVMLETVPRSGEVYTCQVEHPSVTSPLTVEWRARSESAQSKMGGGGSGGGGSGGGGSLEIEAAFLERENTALETRVAELRQRVQRLRNRVSQYRTRYGPLGGGK

SEQ ID NO: 383 - DNA, 1479 bp, Artificial sequence
  synthetic sequence
atgtacaggatgcaactcctgtcttgcattgcactaagtcttgcacttgtcacaaacagtgcacctacttcaagttctacaaagaaaacacagctacaactggaggcattactgctggatttacagatgattttgaatggaattaataattacaagaatcccaaactcaccaggatgctcacagcaaagttttacatgcccaagaaggccacagaactgaaacatcttcagtgtctagaagaagaactcaaacctctggaggaagtgctaaatttagctcaaagcaaaaactttcacttaagacccagggacttaatcagcaatatcaacgtaatagttctggaactaaagggatctgaaacaacattcatgtgtgaatatgctgatgagacagcaaccattgtagaatttctgaacagatggattaccttttgtcaaagcatcatctcaacactgactggaggcggaggatctggtggtggaggttctggtggtgggggatctggaggcggaggatctgcacctacttcaagttctacaaagaaaacacagctacaactggaggcattactgctggatttacagatgattttgaatggaattaataattacaagaatcccaaactcaccaggatgctcacagcaaagttttacatgcccaagaaggccacagaactgaaacatcttcagtgtctagaagaagaactcaaacctctggaggaagtgctaaatttagctcaaagcaaaaactttcacttaagacccagggacttaatcagcaatatcaacgtaatagttctggaactaaagggatctgaaacaacattcatgtgtgaatatgctgatgagacagcaaccattgtagaatttctgaacagatggattaccttttgtcaaagcatcatctcaacactgactggaggcggaggatctggtggtggaggttctggtggtgggggatctggaggcggaggatctcctaaggtgactgtgtatccttcaaagacccagcccctgcagcaccacaacctcctggtctgctctgtgagtggtttctatccaggcagcattgaagtcaggtggttccggaacggccaggaagagaaggctggggtggtgtccacaggcctgatccagaatggagattggaccttccagaccctggtgatgctggaaacagttcctcggagtggagaggtttacacctgccaagtggagcacccaagtgtgacgagccctctcacagtggaatggagagcacggtctgaatctgcacagagcaagatgggtggaggtggctcaggaggcggcggcagcggtggaggagggagcctggagatcgaggccgccttcctggagcgggagaacaccgccctggagacccgggtggccgagctgcggcagcgggtgcagcggctgcggaaccgggtgtcccagtaccggacccggtacggccccctgggcggcggcaagtagtga

SEQ ID NO: 384 - protein, 429 aa, Artificial sequence
  synthetic sequence
MYRMQLLSCIALSLALVTNSAPTSSSTKKTQLQLEALLLDLQMILNGINNYKNPKLTRMLTAKFYMPKKATELKHLQCLEEELKPLEEVLNLAQSKNFHLRPRDLISNINVIVLELKGSETTFMCEYADETATIVEFLNRWITFCQSIISTLTGGGGSGGGGSGGGGSGGGGSAPTSSSTKKTQLQLEALLLDLQMILNGINNYKNPKLTRMLTAKFYMPKKATELKHLQCLEEELKPLEEVLNLAQSKNFHLRPRDLISNINVIVLELKGSETTFMCEYADETATIVEFLNRWITFCQSIISTLTGGGGSGGGGSGGGGSGGGGSPKVTVYPSKTQPLQHHNLLVCSVSGFYPGSIEVRWFRNGQEEKAGVVSTGLIQNGDWTFQTLVMLETVPRSGEVYTCQVEHPSVTSPLTVEWRARSESAQSKM

SEQ ID NO: 385 - DNA, 1293 bp, Artificial sequence
  synthetic sequence
atgtacaggatgcaactcctgtcttgcattgcactaagtcttgcacttgtcacaaacagtgcacctacttcaagttctacaaagaaaacacagctacaactggaggcattactgctggatttacagatgattttgaatggaattaataattacaagaatcccaaactcaccaggatgctcacagcaaagttttacatgcccaagaaggccacagaactgaaacatcttcagtgtctagaagaagaactcaaacctctggaggaagtgctaaatttagctcaaagcaaaaactttcacttaagacccagggacttaatcagcaatatcaacgtaatagttctggaactaaagggatctgaaacaacattcatgtgtgaatatgctgatgagacagcaaccattgtagaatttctgaacagatggattaccttttgtcaaagcatcatctcaacactgactggaggcggaggatctggtggtggaggttctggtggtgggggatctggaggcggaggatctgcacctacttcaagttctacaaagaaaacacagctacaactggaggcattactgctggatttacagatgattttgaatggaattaataattacaagaatcccaaactcaccaggatgctcacagcaaagttttacatgcccaagaaggccacagaactgaaacatcttcagtgtctagaagaagaactcaaacctctggaggaagtgctaaatttagctcaaagcaaaaactttcacttaagacccagggacttaatcagcaatatcaacgtaatagttctggaactaaagggatctgaaacaacattcatgtgtgaatatgctgatgagacagcaaccattgtagaatttctgaacagatggattaccttttgtcaaagcatcatctcaacactgactggaggcggaggatctggtggtggaggttctggtggtgggggatctggaggcggaggatctcctaaggtgactgtgtatccttcaaagacccagcccctgcagcaccacaacctcctggtctgctctgtgagtggtttctatccaggcagcattgaagtcaggtggttccggaacggccaggaagagaaggctggggtggtgtccacaggcctgatccagaatggagattggaccttccagaccctggtgatgctggaaacagttcctcggagtggagaggtttacacctgccaagtggagcacccaagtgtgacgagccctctcacagtggaatggagagcacggtctgaatctgcacagagcaagatgtagtga

SEQ ID NO: 386 - protein, 261 aa, Artificial sequence [sequence omitted]

SEQ ID NO: 387 - protein, 261 aa, Artificial sequence [sequence omitted]

SEQ ID NO: 388 - protein, 269 aa, Artificial sequence [sequence omitted]

SEQ ID NO: 389 - protein, 269 aa, Artificial sequence [sequence omitted]

SEQ ID NO: 390 - protein, 258 aa, Artificial sequence
  synthetic sequence
MMVLQVSAAPRTVALTALLMVLLTSVVQGRATPENYVYQLRQECYAFNGTQRFLERYIYNREEFVRFDSDVGEFRAVTELGRPDEDYWNSQKDLLEEKRAVPDRVCRHNYELDEAVTLQRRVQPKVNVSPSKKGPLQHHNLLVCHVTDFYPGSIQVRWFLNGQEETAGVVSTNLIRNGDWTFQILVMLEMTPQQGDVYICQVEHTSLDSPVTVEWKAQSDSARSKTLTGAGGFVLGLIICGVGIFMHRRSKKVQRGSA

SEQ ID NO: 391 - protein, 258 aa, Artificial sequence [sequence omitted]

SEQ ID NO: 392 - protein, 258 aa, Artificial sequence [sequence omitted]

SEQ ID NO: 393 - protein, 258 aa, Artificial sequence [sequence omitted]

SEQ ID NO: 394 - protein, 255 aa, Artificial sequence [sequence omitted]

SEQ ID NO: 395 - protein, 255 aa, Artificial sequence; identical to SEQ ID NO: 346
  synthetic sequence

SEQ ID NO: 396 - protein, 255 aa, Artificial sequence [sequence omitted]

SEQ ID NO: 397 - protein, 255 aa, Artificial sequence [sequence omitted]

SEQ ID NO: 398 - protein, 255 aa, Artificial sequence
  synthetic sequence
MILNKALMLGALALTTVMSPCGGEDIVADHVASYGVNLYQSYGPSGQYSHEFDGDEEFYVDLERKETVWQLPLFRRFRRFDPQFALTNIAVLKHNLNIVIKRSNSTAATNEVPEVTVFSKSPVTLGQPNTLICLVDNIFPPVVNITWLSNGHSVTEGVSETSFLSKSDHSFFKISYLTFLPSADEIYDCKVEHWGLDEPLLKHWEPEIPTPMSELTETVVCALGLSVGLVGIVVGTVLIIRGLRSVGASRHQGPL

SEQ ID NO: 399 - protein, 255 aa, Artificial sequence [sequence omitted]

SEQ ID NO: 400 - protein, 254 aa, Artificial sequence
  synthetic sequence
MILNKALLLGALALTTVMSPCGGEDIVADHVASYGVNLYQSYGPSGQYTHEFDGDEQFYVDLGRKETVWCLPVLRQFRFDPQFALTNIAVTKHNLNILIKRSNSTAATNEVPEVTVFSKSPVTLGQPNTLICLVDNIFPPVVNITWLSNGHSVTEGVSETSFLSKSDHSFFKISYLTFLPSADEIYDCKVEHWGLDEPLLKHWEPEIPAPMSELTETVVCALGLSVGLVGIVVGTVFIIRGLRSVGASRHQGPL

SEQ ID NO: 401 - protein, 254 aa, Artificial sequence
  synthetic sequence
MILNKALMLGALALTTVMSPCGGEDIVADHVASYGVNLYQSYGPSGQYTHEFDGDEQFYVDLGRKETVWCLPVLRQFRFDPQFALTNIAVLKHNLNSLIKRSNSTAATNEVPEVTVFSKSPVTLGQPNILICLVDNIFPPVVNITWLSNGHSVTEGVSETSFLSKSDHSFFKISYLTLLPSAEESYDCKVEHWGLDKPLLKHWEPEIPAPMSELTETVVCALGLSVGLVGIVVGTVFIIRGLRSVGASRHQGPL

SEQ ID NO: 402 - protein, 254 aa, Artificial sequence [sequence omitted]

SEQ ID NO: 403 - protein, 254 aa, Artificial sequence
  synthetic sequence
MAISGVPVLGFFIIAVLMSAQESWAIKEEHVIIQAEFYLNPDQSGEFMFDFDGDEIFHVDMAKKETVWRLEEFGRFASFEAQGALANIAVDKANLEIMTKRSNYTPITNVPPEVTVLTNSPVELREPNVLICFIDKFTPPVVNVTWLRNGKPVTTGVSETVFLPREDHLFRKFHYLPFLPSTEDVYDCRVEHWGLDEPLLKHWEFDAPSPLPETTENVVCALGLTVGLVGIIIGTIFIIKGVRKSNAAERRGPL

SEQ ID NO: 404 - protein, 9 aa, Artificial sequence
  synthetic sequence
LLMGTLGIV

SEQ ID NO: 405 - protein, 8 aa, Artificial sequence
  synthetic sequence
TLGIVCPI

SEQ ID NO: 406 - protein, 10 aa, Artificial sequence
  synthetic sequence
YMLDLQPETT

SEQ ID NO: 407 - protein, 9 aa, Artificial Sequence
  synthetic sequence
YMLDLQPET

SEQ ID NO: 408 - protein, 15 aa, Artificial sequence
  synthetic sequence
ENPVVHFFKNIVTPR

SEQ ID NO: 409 - protein, 15 aa, Artificial sequence
  synthetic sequence
GKTKEGVLYVGSKTK

SEQ ID NO: 410 - protein, 15 aa, Artificial sequence
  synthetic sequence
KTKEGVLYVGSKTKE

SEQ ID NO: 411 - protein, 15 aa, Artificial sequence
  synthetic sequence
  MOD_RES (14)..(14): PHOSPHORYLATION
MPVDPDNEAYEMPSE

SEQ ID NO: 412 - protein, 15 aa, Artificial sequence
  synthetic sequence
  MOD_RES (9)..(9): PHOSPHORYLATION
DNEAYEMPSEEGYQD

SEQ ID NO: 413 - protein, 14 aa, Artificial sequence
  synthetic sequence
  MOD_RES (4)..(4): PHOSPHORYLATION
EMPSEEGYQDYEPE

SEQ ID NO: 414 - protein, 12 aa, Artificial sequence
  synthetic sequence
  MOD_RES (1)..(1): PHOSPHORYLATION
SEEGYQDYEPEA

SEQ ID NO: 415 - protein, 266 aa, Artificial sequence
  synthetic sequence
MVCLKFPGGSCMAALTVTLMVLSSPLALAGDTRPRFLEQVKHECHFFNGTERVRFLDRYFYHQEEYVRFDSDVGEYRAVTELGRPDAEYWNSQKDLLEQRRAEVDTYCRHNYGVVESFTVQRRVYPEVTVYPAKTQPLQHHNLLVCSVNGFYPGSIEVRWFRNGQEEKTGVVSTGLIQNGDWTFQTLVMLETVPRSGEVYTCQVEHPSLTSPLTVEWRARSESAQSKMLSGVGGFVLGLLFLGAGLFIYFRNQKGHSGLQPTGFLS

SEQ ID NO: 416 - protein, 266 aa, Artificial sequence [sequence omitted]

SEQ ID NO: 417 - protein, 5 aa, Artificial sequence
  synthetic sequence
QRRAA

SEQ ID NO: 418 - protein, 5 aa, Artificial sequence
  synthetic sequence
QKRAA

SEQ ID NO: 419 - protein, 5 aa, Artificial sequence
  synthetic sequence
QQRAA

SEQ ID NO: 420 - protein, 5 aa, Artificial sequence
  synthetic sequence
KKRAA

SEQ ID NO: 421 - protein, 5 aa, Artificial sequence
  synthetic sequence
RRRAA

SEQ ID NO: 422 - protein, 5 aa, Artificial sequence
  synthetic sequence
RKRAA

SEQ ID NO: 423 - protein, 5 aa, Artificial sequence
  synthetic sequence
GGGGS

SEQ ID NO: 424 - protein, 10 aa, Artificial sequence
  synthetic sequence
GGGGSGGGGS

SEQ ID NO: 425 - protein, 25 aa, Artificial sequence
  synthetic sequence
GGGGSGGGGSGGGGSGGGGSGGGGS

SEQ ID NO: 426 - protein, 30 aa, Artificial sequence
  synthetic sequence
GGGGSGGGGSGGGGSGGGGSGGGGSGGGGS

SEQ ID NO: 427 - protein, 35 aa, Artificial sequence
  synthetic sequence
GGGGSGGGGSGGGGSGGGGSGGGGSGGGGSGGGGS

SEQ ID NO: 428 - protein, 40 aa, Artificial sequence; identical to SEQ ID NO: 1
  synthetic sequence

SEQ ID NO: 429 - protein, 45 aa, Artificial sequence
  synthetic sequence
GGGGSGGGGSGGGGSGGGGSGGGGSGGGGSGGGGSGGGGSGGGGS

SEQ ID NO: 430 - protein, 50 aa, Artificial sequence
  synthetic sequence
GGGGSGGGGSGGGGSGGGGSGGGGSGGGGSGGGGSGGGGSGGGGSGGGGS

SEQ ID NO: 431 - protein, 120 aa, Artificial sequence
  synthetic sequence
  VARIANT (2)..(120): Xaa is any amino acid, and each copy of Gly Xaa Xaa at positiions 31 to 120 may be present or absent
GXXGXXGXXGXXGXXGXXGXXGXXGXXGXXGXXGXXGXXGXXGXXGXXGXXGXXGXXGXXGXXGXXGXXGXXGXXGXXGXXGXXGXXGXXGXXGXXGXXGXXGXXGXXGXXGXXGXXGXX

SEQ ID NO: 432 - protein, 120 aa, Artificial sequence
  synthetic sequence
  VARIANT (2)..(120): Xaa is any amino acid, and each copy of Gly Xaa Pro at positiions 31 to 120 may be present or absent
GXPGXPGXPGXPGXPGXPGXPGXPGXPGXPGXPGXPGXPGXPGXPGXPGXPGXPGXPGXPGXPGXPGXPGXPGXPGXPGXPGXPGXPGXPGXPGXPGXPGXPGXPGXPGXPGXPGXPGXP

SEQ ID NO: 433 - protein, 92 aa, Artificial sequence
  synthetic sequence
DTRPRFLWQHKFECHFFNGTERVRLLERCIYNQEESVRFDSDVGEYRAVTELGRPAAEYWNSQKDLLEQRRAAVDTYCRHNYGVGESFTVQR

SEQ ID NO: 434 - protein, 92 aa, Artificial sequence
  synthetic sequence
DTRPRFLEQVKHECHFFNGTERVRFLDRYFYHQEEYVRFDSDVGEYRAVTELGRPDAEYWNSQKDLLEQKRAAVDTYCRHNYGVGESFTVQR

SEQ ID NO: 435 - protein, 20 aa, Artificial sequence
  synthetic sequence
GSSSSGSSSSGSSSSGSSSS

SEQ ID NO: 436 - protein, 25 aa, Artificial sequence
  synthetic sequence
GSSSSGSSSSGSSSSGSSSSGSSSS

SEQ ID NO: 437 - protein, 50 aa, Artificial sequence; identical to SEQ ID NO: 430
  synthetic sequence
  VARIANT (6)..(50): Each copy of Gly Gly Gly Gly Ser at positions 6 to 50 may either be present of absent
